(19) United States
(12) Patent Application Publication
(10) Pub. No.: US 2020/0277373 A1
(43) Pub. Date: Sep. 3, 2020

(54) ANTI-TREM2 ANTIBODIES AND METHODS OF USE THEREOF

(71) Applicant: Denali Therapeutics Inc., South San Francisco, CA (US)

(72) Inventors: Hang Chen, South San Francisco, CA (US); Gilbert Di Paolo, South San Francisco, CA (US); Rui Hao, South San Francisco, CA (US); Joseph W. Lewcock, South San Francisco, CA (US); Nathan Moerke, South San Francisco, CA (US); Alicia A. Nugent, South San Francisco, CA (US); Rishi Rakhit, South San Francisco, CA (US); Ju Shi, South San Francisco, CA (US); Rinkan Shukla, South San Francisco, CA (US); Ankita Srivastava, South San Francisco, CA (US); Bettina Van Lengerich, South San Francisco, CA (US); Yin Zhang, South San Francisco, CA (US)

(73) Assignee: Denali Therapeutics Inc., South San Francisco, CA (US)

(21) Appl. No.: 16/646,536

(22) PCT Filed: Sep. 14, 2018
(86) PCT No.: PCT/US2018/051166

§ 371 Date: Mar. 11, 2020

Related U.S. Application Data
(60) Provisional application No. 62/621,380, filed on Jan. 24, 2018.
(60) Provisional application No. 62/583,379, filed on Nov. 8, 2017.
(60) Provisional application No. 62/558,803, filed on Sep. 14, 2017.

(51) Int. Cl. C07K 16/28; A61P 25/28; C07K 16/40

(52) U.S. Cl. CPC C07K 16/2803; A61P 25/28; C07K 16/40; C07K 2317/33; C07K 2317/34; A61K 2039/505; C07K 2317/75; C07K 2317/76; C07K 2317/92; C12Y 207/10002; C07K 2317/526

(57) ABSTRACT

In one aspect, antibodies that specifically bind to a human triggering receptor expressed on myeloid cells 2 (TREM2) protein are provided. In some embodiments, the antibody increases levels of soluble TREM2 (sTREM2). In some embodiments, the antibody decreases levels of sTREM2. In some embodiments, the antibody enhances TREM2 activity. In some embodiments, the antibody inhibits TREM2 activity.

### CROSS-REFERENCE TO RELATED APPLICATIONS

[0001] This application claims priority to U.S. Provisional Patent Application Nos. 62/558,803, filed Sep. 14, 2017, 62/583,379, filed Nov. 8, 2017, and 62/621,380, filed Jan. 24, 2018, the content of each of which is incorporated by reference in its entirety.

### BACKGROUND

[0002] Triggering receptor expressed on myeloid cells-2 (TREM2) is a transmembrane receptor that is expressed on microglia and is believed to function in regulating phagocytosis, cell survival, and the production of pro-inflammatory cytokines. Mutations in TREM2 have been identified in neurodegenerative diseases including Alzheimer's disease, Nasu-Hakola disease, Parkinson's disease, amyotrophic lateral sclerosis, and frontotemporal dementia. Additionally, altered levels of soluble TREM2 (sTREM2) have been reported in the cerebrospinal fluid of patients having Alzheimer's disease or frontotemporal dementia who have a mutation in TREM2.

[0003] There remains a need for therapeutic agents that modulate TREM2 activity or levels of sTREM2.

### BRIEF SUMMARY

[0004] In one aspect, isolated antibodies or antigen-binding portions thereof that specifically bind to a human triggering receptor expressed on myeloid cells 2 (TREM2) protein are provided. In some embodiments, the antibody or antigen-binding portion thereof modulates (e.g., decreases or increases) levels of sTREM2. In some embodiments, the antibody or antigen-binding portion thereof modulates (e.g., decreases or increases) levels of sTREM2 and further modulates (e.g., enhances or inhibits) one or more TREM2 activities. In some embodiments, the antibody or antigen-binding portion thereof modulates (e.g., enhances or inhibits) spleen tyrosine kinase (Syk) phosphorylation. In some embodiments, the antibody or antigen-binding portion thereof modulates (e.g., enhances or inhibits) phagocytosis. In some embodiments, the antibody or antigen-binding portion thereof modulates (e.g., enhances or inhibits) migration of myeloid cells, macrophages, microglia, or disease-associated microglia. In some embodiments, the antibody or antigen-binding portion thereof modulates (e.g., enhances or inhibits) differentiation of myeloid cells, macrophages, microglia, or disease-associated microglia. In some embodiments, the antibody or antigen-binding portion thereof modulates (e.g., enhances or inhibits) survival of myeloid cells, macrophages, microglia, or disease-associated microglia. In some embodiments, the antibody or antigen-binding portion thereof modulates (e.g., enhances or inhibits) one or more TREM2 activities without blocking binding of a native TREM2 ligand. In some embodiments, the antibody or antigen-binding portion thereof modulates (e.g., enhances or inhibits) one or more TREM2 activities that is induced by a TREM2 ligand. In some embodiments, the antibody or antigen-binding portion thereof modulates (e.g., selectively enhances or selectively inhibits) one or more TREM2 activities that is induced by a TREM2 ligand. In some embodiments, the antibody or antigen-binding portion thereof modulates (e.g., enhances or inhibits) one or more TREM2 activities that is induced by a TREM2 ligand but does not modulate (e.g., enhance or inhibit) TREM2 activity in the absence of the TREM2 ligand. In some embodiments, the antibody or antigen-binding portion thereof prevents activation of TREM2 by a TREM2 ligand. In some embodiments, the antibody or antigen-binding portion thereof blocks binding of a TREM2 ligand to TREM2. In some embodiments, the TREM2 ligand is selected from the group consisting of 1-palmitoyl-2-(5′-oxo-valeroyl)-sn-glycero-3-phosphocholine (POVPC), 2-Arachidonoylglycerol (2-AG), 7-ketocholesterol (7-KC), 24(S)hydroxycholesterol (240HC), 25(S)hydroxycholesterol (25OHC), 27-hydroxycholesterol (270HC), Acyl Carnitine (AC), alkylacylglycerophosphocholine (PAF), α-galactosylceramide (KRN7000), Bis(monoacylglycero)phosphate (BMP), Cardiolipin (CL), Ceramide, Ceramide-1-phosphate (C1P), Cholesteryl ester (CE), Cholesterol phosphate (CP), Diacylglycerol 34:1 (DG 34:1), Diacylglycerol 38:4 (DG 38:4), Diacylglycerol pyrophosphate (DGPP), Dihyrdoceramide (DhCer), Dihydrosphingomyelin (DhSM), Ether phosphatidylcholine (PCe), Free cholesterol (FC), Galactosylceramide (GalCer), Galactosylsphingosine (GalSo), Ganglioside GM1, Ganglioside GM3, Glucosylsphingosine (GlcSo), Hank's Balanced Salt Solution (HBSS), Kdo2-Lipid A (KLA), Lactosylceramide (LacCer), lysoalkylacylglycerophosphocholine (LPAF), Lysophosphatidic acid (LPA), Lysophosphatidylcholine (LPC), Lysophosphatidylethanolamine (LPE), Lysophosphatidylglycerol (LPG), Lysophosphatidylinositol (LPI), Lysosphingomyelin (LSM), Lysophosphatidylserine (LPS), N-Acyl-phosphatidylethanolamine (NAPE), N-Acyl-Serine (NSer), Oxidized phosphatidylcholine (oxPC), Palmitic-acid-9-hydroxy-stearic-acid (PAHSA), Phosphatidylethanolamine (PE), Phosphatidylethanol (PEtOH), Phosphatidic acid (PA), Phosphatidylcholine (PC), Phosphatidylglycerol (PG), Phosphatidylinositol (PI), Phosphatidylserine (PS), Sphinganine, Sphinganine-1-phosphate (Sa1P), Sphingomyelin (SM), Sphingosine, Sphingosine-1-phosphate (So1P), and Sulfatide.

[0005] In another aspect, isolated antibodies or antigen-binding portions thereof that specifically bind to human TREM2 and that recognize an epitope of human TREM2 that is the same or substantially the same as an epitope recognized by an antibody clone as described herein. In some embodiments, the antibody or antigen-binding portion recognizes an epitope of human TREM2 that is the same or substantially the same as an epitope recognized by an antibody clone selected from the group consisting of 2G4.B1, 3D3.A1, 7B10.A2, 8A111.B1, 13B11.A1, 14D5.F1, 14H11.A1, 19F10.F3, 21D4.D1, 21D6.G2, 21D11, 22B8.B1, 22G9.D1, 24B4.A1, 26D2.D1, 26D5.A1, 26D11.B1, 26E2.A3, 30A8.A1, 30F2.A2, 38E9.E5, 39H10.A1, 40H3.A4, 42E8.H1, 43E9.H1, 44E2.H1, 44E3.B1, 49H11.B1, 51D4, 52H9.D1, 53H11.D3, 54C2.A1, 55B9.A1, 57D7.A1, 59C6.F1, 60A4.B1, RS9.E2, RS9.F6, RS9.F10, RS11.1F5, RS11.1G6, RS11.1A10, RS11.1D11, RS11.4A5, RS11.4H6, RS11.4D7, RS11.4D9, RS11.4F11, RS12.1C6, RS12.1C10, RS12.2D1, RS12.2D4, RS12.2E1, RS12.2F2, RS12.2G1, RS12.2H1, and RS12.3C10. In some embodiments, the antibody or antigen-binding portion recognizes an epitope of human TREM2 that is the same or substantially the same as the epitope recognized by RS9.F6. In some embodiments, the antibody or antigen-binding portion binds to an epitope on human TREM2 that comprises amino acid residues 140-144. In some embodiments, the antibody or antigen-binding portion makes direct contact with one or more of residues Asp140, Leu141, Trp142, Phe143, and Pro144. In some embodiments, the antibody or antigen-binding portion makes direct contact with residue Trp142. In some embodiments, the antibody or antigen-binding portion makes direct contact with each of residues Asp140, Leu141, Trp142, Phe143, and Pro144. In some embodiments, the antibody or antigen-binding portion binds a TREM2 fragment that comprises or consists of amino acid residues 140-148.

[0006] In some embodiments, an antibody or antigen-binding portion thereof having one or more TREM2-associated activities as described herein also recognizes an epitope of human TREM2 that is the same or substantially the same as an epitope recognized by an antibody clone as described herein (e.g., an antibody clone selected from the group consisting of 2G4.B1, 3D3.A1, 7B10.A2, 8A11.B1, 13B11.A1, 14D5.F1, 14H11.A1, 19F10.F3, 21D4.D1, 21D6.G2, 21D11, 22B8.B1, 22G9.D1, 24B4.A1, 26D2.D1, 26D5.A1, 26D11.B1, 26E2.A3, 30A8.A1, 30F2.A2, 38E9.E5, 39H10.A1, 40H3.A4, 42E8.H1, 43E9.H1, 44E2.H1, 44E3.B1, 49H11.B1, 51D4, 52H9.D1, 53H11.D3, 54C2.A1, 55B9.A1, 57D7.A1, 59C6.F1, 60A4.B1, RS9.E2, RS9.F6, RS9.F10, RS11.1F5, RS11.1G6, RS11.1A10, RS11.1D11, RS11.4A5, RS11.4H6, RS11.4D7, RS11.4D9, RS11.4F11, RS12.1C6, RS12.1C10, RS12.2D1, RS12.2D4, RS12.2E1, RS12.2F2, RS12.2G1, RS12.2H1, and RS12.3C10). In some embodiments, the antibody or antigen-binding portion recognizes an epitope of human TREM2 that is the same or substantially the same as the epitope recognized by RS9.F6. In some embodiments, the antibody or antigen-binding portion binds to an epitope on human TREM2 that comprises amino acid residues 140-144. In some embodiments, the antibody or antigen-binding portion makes direct contact with one or more of residues Asp140, Leu141, Trp142, Phe143, and Pro144. In some embodiments, the antibody or antigen-binding portion makes direct contact with residue Trp142. In some embodiments, the antibody or antigen-binding portion makes direct contact with each of residues Asp140, Leu141, Trp142, Phe143, and Pro144. In some embodiments, the antibody or antigen-binding portion binds a TREM2 fragment that comprises or consists of amino acid residues 140-148.

[0007] In another aspect, antibodies or antigen-binding portion thereof having one or more CDR, heavy chain variable region, and/or light chain variable region sequences of an antibody described herein are provided. In some embodiments, the antibody or antigen-binding portion comprises one or more complementarity determining regions (CDRs) (e.g., all CDRs) having at least 90%, 91%, 92%, 93%, 94%, 95%, 96%, 97%, 98%, or 99% sequence identity to a CDR of an antibody clone selected from the group consisting of 2G4.B1, 3D3.A1, 7B10.A2, 8A11.B1, 13B11.A1, 14D5.F1, 14H11.A1, 19F10.F3, 21D4.D1, 21D6.G2, 21D11, 22B8.B1, 22G9.D1, 24B4.A1, 26D2.D1, 26D5.A1, 26D11.B1, 26E2.A3, 30A8.A1, 30F2.A2, 38E9.E5, 39H10.A1, 40H3.A4, 42E8.H1, 43E9.H1, 44E2.H1, 44E3.B1, 49H11.B1, 51D4, 52H9.D1, 53H11.D3, 54C2.A1, 55B9.A1, 57D7.A1, 59C6.F1, 60A4.B1, RS9.E2, RS9.F6, RS9.F10, RS11.1F5, RS11.1G6, RS11.1A10, RS11.1D11, RS11.4A5, RS11.4H6, RS11.4D7, RS11.4D9, RS11.4F11, RS12.1C6, RS12.1C10, RS12.2D1, RS12.2D4, RS12.2E1, RS12.2F2, RS12.2G1, RS12.2H1, and RS12.3C10. In some embodiments, the antibody or antigen-binding portion thereof comprises one or more CDRs (e.g., all CDRs) that has up to two amino acid substitutions relative to a CDR of an antibody clone selected from the group consisting of 2G4.B1, 3D3.A1, 7B10.A2, 8A11.B1, 13B11.A1, 14D5.F1, 14H11.A1, 19F10.F3, 21D4.D1, 21D6.G2, 21D11, 22B8.B1, 22G9.D1, 24B4.A1, 26D2.D1, 26D5.A1, 26D11.B1, 26E2.A3, 30A8.A1, 30F2.A2, 38E9.E5, 39H10.A1, 40H3.A4, 42E8.H1, 43E9.H1, 44E2.H1, 44E3.B1, 49H11.B1, 51D4, 52H9.D1, 53H11.D3, 54C2.A1, 55B9.A1, 57D7.A1, 59C6.F1, 60A4.B1, RS9.E2, RS9.F6, RS9.F10, RS11.1F5, RS11.1G6, RS11.1A10, RS11.1D11, RS11.4A5, RS11.4H6, RS11.4D7, RS11.4D9, RS11.4F11, RS12.1C6, RS12.1C10, RS12.2D1, RS12.2D4, RS12.2E1, RS12.2F2, RS12.2G1, RS12.2H1, and RS12.3C10. In some embodiments, the antibody or antigen-binding portion thereof comprises each of a heavy chain CDR1 (CDR-H1), a heavy chain CDR2 (CDR-H2), a heavy chain CDR3 (CDR-H3), a light chain CDR1 (CDR-L1), a light chain CDR2 (CDR-L2), and a light chain CDR3 (CDR-L3) that is identical to a CDR-H1, CDR-H2, CDR-H3, CDR-L1, CDR-L2, and CDR-L3 of an antibody clone selected from the group consisting of 2G4.B1, 3D3.A1, 7B10.A2, 8A11.B1, 13B11.A1, 14D5.F1, 14H11.A1, 19F10.F3, 21D4.D1, 21D6.G2, 21D11, 22B8.B1, 22G9.D1, 24B4.A1, 26D2.D1, 26D5.A1, 26D11.B1, 26E2.A3, 30A8.A1, 30F2.A2, 38E9.E5, 39H10.A1, 40H3.A4, 42E8.H1, 43E9.H1, 44E2.H1, 44E3.B1, 49H11.B1, 51D4, 52H9.D1, 53H11.D3, 54C2.A1, 55B9.A1, 57D7.A1, 59C6.F1, 60A4.B1, RS9.E2, RS9.F6, RS9.F10, RS11.1F5, RS11.1G6, RS11.1A10, RS11.1D11, RS11.4A5, RS11.4H6, RS11.4D7, RS11.4D9, RS11.4F11, RS12.1C6, RS12.1C10, RS12.2D1, RS12.2D4, RS12.2E1, RS12.2F2, RS12.2G1, RS12.2H1, and RS12.3C10.

[0008] In some embodiments, the antibody or antigen-binding portion thereof comprises a heavy chain variable region comprising an amino acid sequence that has at least 90%, 91%, 92%, 93%, 94%, 95%, 96%, 97%, 98%, or 99% sequence identity to the heavy chain variable region of an antibody clone selected from the group consisting of 2G4.B1, 3D3.A1, 7B10.A2, 8A11.B1, 13B11.A1, 14D5.F1, 14H11.A1, 19F10.F3, 21D4.D1, 21D6.G2, 21D11, 22B8.B1, 22G9.D1, 24B4.A1, 26D2.D1, 26D5.A1, 26D11.B1, 26E2.A3, 30A8.A1, 30F2.A2, 38E9.E5, 39H10.A1, 40H3.A4, 42E8.H1, 43E9.H1, 44E2.H1, 44E3.B1, 49H11.B1, 51D4, 52H9.D1, 53H11.D3, 54C2.A1, 55B9.A1, 57D7.A1, 59C6.F1, 60A4.B1, RS9.E2, RS9.F6, RS9.F10, RS11.1F5, RS11.1G6, RS11.1A10, RS11.1D11, RS11.4A5, RS11.4H6, RS11.4D7, RS11.4D9, RS11.4F11, RS12.1C6, RS12.1C10, RS12.2D1, RS12.2D4, RS12.2E1, RS12.2F2, RS12.2G1, RS12.2H1, and RS12.3C10. In some embodiments, the antibody or antigen-binding portion thereof comprises a light chain variable region comprising an amino acid sequence that has at least 90%, 91%, 92%, 93%, 94%, 95%, 96%, 97%, 98%, or 99% sequence identity to the light chain variable region of an antibody clone selected from the group consisting of 2G4.B1, 3D3.A1, 7B10.A2, 8A11.B1, 13B11.A1, 14D5.F1, 14H11.A1, 19F10.F3, 21D4.D1, 21D6.G2, 21D11, 22B8.B1, 22G9.D1, 24B4.A1, 26D2.D1, 26D5.A1, 26D11.B1, 26E2.A3, 30A8.A1, 30F2.A2, 38E9.E5, 39H10.A1, 40H3.A4, 42E8.H1, 43E9.H1, 44E2.H1, 44E3.B1, 49H11.B1, 51D4, 52H9.D1, 53H11.D3, 54C2.A1, 55B9.A1, 57D7.A1, 59C6.F1, 60A4.B1, RS9.E2, RS9.F6, RS9.F10, RS11.1F5, RS11.1G6, RS11.1A10, RS11.1D11, RS11.4A5, RS11.4H6, RS11.4D7, RS11.4D9, RS11.4F11, RS12.1C6, RS12.1C10, RS12.2D1, RS12.2D4, RS12.2E1, RS12.2F2, RS12.2G1, RS12.2H1, and RS12.3C10. In some embodiments, the antibody or antigen-binding portion thereof comprises a heavy chain variable region comprising an amino acid sequence that has at least 90%, 91%, 92%, 93%, 94%, 95%, 96%, 97%, 98%, or 99% sequence identity to the heavy chain variable region of an antibody clone selected from the group consisting of 2G4.B1, 3D3.A1, 7B10.A2, 8A11.B1, 13B11.A1, 14D5.F1, 14H11.A1, 19F10.F3, 21D4.D1, 21D6.G2, 21D11, 22B8.B1, 22G9.D1, 24B4.A1, 26D2.D1, 26D5.A1, 26D11.B1, 26E2.A3, 30A8.A1, 30F2.A2, 38E9.E5, 39H10.A1, 40H3.A4, 42E8.H1, 43E9.H1, 44E2.H1, 44E3.B1, 49H11.B1, 51D4, 52H9.D1, 53H11.D3, 54C2.A1, 55B9.A1, 57D7.A1, 59C6.F1, 60A4.B1, RS9.E2, RS9.F6, RS9.F10, RS11.1F5, RS11.1G6, RS11.1A10, RS11.1D11, RS11.4A5, RS11.4H6, RS11.4D7, RS11.4D9, RS11.4F11, RS12.1C6, RS12.1C10, RS12.2D1, RS12.2D4, RS12.2E1, RS12.2F2, RS12.2G1, RS12.2H1, and RS12.3C10, and comprises a light chain variable region comprising an amino acid sequence that has at least 90%, 91%, 92%, 93%, 94%, 95%, 96%, 97%, 98%, or 99% sequence identity to the light chain variable region of an antibody clone selected from the group consisting of 2G4.B1, 3D3.A1, 7B10.A2, 8A11.B1, 13B11.A1, 14D5.F1, 14H11.A1, 19F10.F3, 21D4.D1, 21D6.G2, 21D11, 22B8.B1, 22G9.D1, 24B4.A1, 26D2.D1, 26D5.A1, 26D11.B1, 26E2.A3, 30A8.A1, 30F2.A2, 38E9.E5, 39H10.A1, 40H3.A4, 42E8.H1, 43E9.H1, 44E2.H1, 44E3.B1, 49H11.B1, 51D4, 52H9.D1, 53H11.D3, 54C2.A1, 55B9.A1, 57D7.A1, 59C6.F1, 60A4.B1, RS9.E2, RS9.F6, RS9.F10, RS11.1F5, RS11.1G6, RS11.1A10, RS11.1D11, RS11.4A5, RS11.4H6, RS11.4D7, RS11.4D9, RS11.4F11, RS12.1C6, RS12.1C10, RS12.2D1, RS12.2D4, RS12.2E1, RS12.2F2, RS12.2G1, RS12.2H1, and RS12.3C10.

[0009] In some embodiments, the antibody or antigen-binding portion thereof comprises a heavy chain variable region comprising an amino acid sequence that (i) has at least 75%, 80%, 85%, 90%, 91%, 92%, 93%, 94%, 95%, 96%, 97%, 98%, or 99% sequence identity to the heavy chain variable region of an antibody clone selected from the group consisting of 2G4.B1, 3D3.A1, 7B10.A2, 8A11.B1, 13B11.A1, 14D5.F1, 14H11.A1, 19F10.F3, 21D4.D1, 21D6.G2, 21D11, 22B8.B1, 22G9.D1, 24B4.A1, 26D2.D1, 26D5.A1, 26D11.B1, 26E2.A3, 30A8.A1, 30F2.A2, 38E9.E5, 39H10.A1, 40H3.A4, 42E8.H1, 43E9.H1, 44E2.H1, 44E3.B1, 49H11.B1, 51D4, 52H9.D1, 53H11.D3, 54C2.A1, 55B9.A1, 57D7.A1, 59C6.F1, 60A4.B1, RS9.E2, RS9.F6, RS9.F10, RS11.1F5, RS11.1G6, RS11.1A10, RS11.1D11, RS11.4A5, RS11.4H6, RS11.4D7, RS11.4D9, RS11.4F11, RS12.1C6, RS12.1C10, RS12.2D1, RS12.2D4, RS12.2E1, RS12.2F2, RS12.2G1, RS12.2H1, and RS12.3C10 and (ii) comprises a CDR-H1, CDR-H2, and CDR-H3 that is identical to the CDR-H1, CDR-H2, and CDR-H3 of the antibody clone. In some embodiments, the antibody or antigen-binding portion thereof comprises a light chain variable region comprising an amino acid sequence that (i) has at least 75%, 80%, 85%, 90%, 91%, 92%, 93%, 94%, 95%, 96%, 97%, 98%, or 99% sequence identity to the light chain variable region of an antibody clone selected from the group consisting of 2G4.B1, 3D3.A1, 7B10.A2, 8A11.B1, 13B11.A1, 14D5.F1, 14H11.A1, 19F10.F3, 21D4.D1, 21D6.G2, 21D11, 22B8.B1, 22G9.D1, 24B4.A1, 26D2.D1, 26D5.A1, 26D11.B1, 26E2.A3, 30A8.A1, 30F2.A2, 38E9.E5, 39H10.A1, 40H3.A4, 42E8.H1, 43E9.H1, 44E2.H1, 44E3.B1, 49H11.B1, 51D4, 52H9.D1, 53H11.D3, 54C2.A1, 55B9.A1, 57D7.A1, 59C6.F1, 60A4.B1, RS9.E2, RS9.F6, RS9.F10, RS11.1F5, RS11.1G6, RS11.1A10, RS11.1D11, RS11.4A5, RS11.4H6, RS11.4D7, RS11.4D9, RS11.4F11, RS12.1C6, RS12.1C10, RS12.2D1, RS12.2D4, RS12.2E1, RS12.2F2, RS12.2G1, RS12.2H1, and RS12.3C10 and (ii) comprises a CDR-L1, CDR-L2, and CDR-L3 that is identical to the CDR-L1, CDR-L2, and CDR-L3 of the antibody clone.

[0010] In some embodiments, the antibody or antigen-binding portion thereof comprises: a heavy chain variable region comprising an amino acid sequence that (i) has at least 75%, 80%, 85%, 90%, 91%, 92%, 93%, 94%, 95%, 96%, 97%, 98%, or 99% sequence identity to the heavy chain variable region of an antibody clone selected from the group consisting of 2G4.B1, 3D3.A1, 7B10.A2, 8A11.B1, 13B11.A1, 14D5.F1, 14H11.A1, 19F10.F3, 21D4.D1, 21D6.G2, 21D11, 22B8.B1, 22G9.D1, 24B4.A1, 26D2.D1, 26D5.A1, 26D11.B1, 26E2.A3, 30A8.A1, 30F2.A2, 38E9.E5, 39H10.A1, 40H3.A4, 42E8.H1, 43E9.H1, 44E2.H1, 44E3.B1, 49H11.B1, 51D4, 52H9.D1, 53H11.D3, 54C2.A1, 55B9.A1, 57D7.A1, 59C6.F1, 60A4.B1, RS9.E2, RS9.F6, RS9.F10, RS11.1F5, RS11.1G6, RS11.1A10, RS11.1D11, RS11.4A5, RS11.4H6, RS11.4D7, RS11.4D9, RS11.4F11, RS12.1C6, RS12.1C10, RS12.2D1, RS12.2D4, RS12.2E1, RS12.2F2, RS12.2G1, RS12.2H1, and RS12.3C10 and (ii) comprises a CDR-H1, CDR-H2, and CDR-H3 that is identical to the CDR-H1, CDR-H2, and CDR-H3 of the antibody clone; and a light chain variable region comprising an amino acid sequence that (i) has at least 75%, 80%, 85%, 90%, 91%, 92%, 93%, 94%, 95%, 96%, 97%, 98%, or 99% sequence identity to the light chain variable region of an antibody clone selected from the group consisting of 2G4.B1, 3D3.A1, 7B10.A2, 8A11.B1, 13B11.A1, 14D5.F1, 14H11.A1, 19F10.F3, 21D4.D1, 21D6.G2, 21D11, 22B8.B1, 22G9.D1, 24B4.A1, 26D2.D1, 26D5.A1, 26D11.B1, 26E2.A3, 30A8.A1, 30F2.A2, 38E9.E5, 39H10.A1, 40H3.A4, 42E8.H1, 43E9.H1, 44E2.H1, 44E3.B1, 49H11.B1, 51D4, 52H9.D1, 53H11.D3, 54C2.A1, 55B9.A1, 57D7.A1, 59C6.F1, 60A4.B1, RS9.E2, RS9.F6, RS9.F10, RS11.1F5, RS11.1G6, RS11.1A10, RS11.1D11, RS11.4A5, RS11.4H6, RS11.4D7, RS11.4D9, RS11.4F11, RS12.1C6, RS12.1C10, RS12.2D1, RS12.2D4, RS12.2E1, RS12.2F2, RS12.2G1, RS12.2H1, and RS12.3C10 and (ii) comprises a CDR-L1, CDR-L2, and CDR-L3 that is identical to the CDR-L1, CDR-L2, and CDR-L3 of the antibody clone.

[0011] In some embodiments, an antibody or antigen-binding portion thereof having one or more TREM2-associated activities as described herein also comprises one or more CDR, heavy chain variable region, and/or light chain variable region sequences of an antibody described herein (e.g., an antibody clone selected from the group consisting of 2G4.B1, 3D3.A1, 7B10.A2, 8A11.B1, 13B11.A1, 14D5.F1, 14H11.A1, 19F10.F3, 21D4.D1, 21D6.G2, 21D11, 22B8.B1, 22G9.D1, 24B4.A1, 26D2.D1, 26D5.A1, 26D11.B1, 26E2.A3, 30A8.A1, 30F2.A2, 38E9.E5, 39H10.A1, 40H3.A4, 42E8.H1, 43E9.H1, 44E2.H1, 44E3.B1, 49H11.B1, 51D4, 52H9.D1, 53H11.D3, 54C2.A1, 55B9.A1, 57D7.A1, 59C6.F1, 60A4.B1, RS9.E2, RS9.F6, RS9.F10, RS11.1F5, RS11.1G6, RS11.1A10, RS11.1D11, RS11.4A5, RS11.4H6, RS11.4D7, RS11.4D9, RS11.4F11, RS12.1C6, RS12.1C10, RS12.2D1, RS12.2D4, RS12.2E1, RS12.2F2, RS12.2G1, RS12.2H1, and RS12.3C10).

[0012] In some embodiments, an antibody or antigen-binding portion thereof that specifically bind to human TREM2 comprises one or more (e.g., one, two, three, four, five, or all six) CDRs selected from the group consisting of:
[0013] (a) a heavy chain CDR1 sequence having at least 90% sequence identity to the amino acid sequence of any one of SEQ ID NOs:8, 36, 39, 45, 51, 57, 62, 68, 74, 81, 85, 307, and 315 or having up to two amino acid substitutions relative to the amino acid sequence of any one of SEQ ID NOs:8, 36, 39, 45, 51, 57, 62, 68, 74, 81, 85, 307, and 315;
[0014] (b) a heavy chain CDR2 sequence having at least 90% sequence identity to the amino acid sequence of any one of SEQ ID NOs:9, 37, 40, 46, 52, 58, 63, 75, 79, 82, 86, 308, and 316 or having up to two amino acid substitutions relative to the amino acid sequence of any one of SEQ ID NOs:9, 37, 40, 46, 52, 58, 63, 75, 79, 82, 86, 308, and 316;
[0015] (c) a heavy chain CDR3 sequence having at least 90% sequence identity to the amino acid sequence of any one of SEQ ID NOs:10, 41, 47, 53, 59, 64, 70, 76, 83, 87, 309, and 317 or having up to two amino acid substitutions relative to the amino acid sequence of any one of SEQ ID NOs:10, 41, 47, 53, 59, 64, 70, 76, 83, 87, 309, and 317;
[0016] (d) a light chain CDR1 sequence having at least 90% sequence identity to the amino acid sequence of any one of SEQ ID NOs: 11, 42, 48, 54, 60, 65, 71, 77, 88, and 311 or having up to two amino acid substitutions relative to the amino acid sequence of any one of SEQ ID NOs:11, 42, 48, 54, 60, 65, 71, 77, 88, and 311;
[0017] (e) a light chain CDR2 sequence having at least 90% sequence identity to the amino acid sequence of any one of SEQ ID NOs:12, 38, 43, 49, 55, 66, 72, 312, and 319 or having up to two amino acid substitutions relative to the amino acid sequence of any one of SEQ ID NOs: 12, 38, 43, 49, 55, 66, 72, 312, and 319; and
[0018] (f) a light chain CDR3 sequence having at least 90% sequence identity to the amino acid sequence of any one of SEQ ID NOs: 13, 44, 50, 56, 61, 67, 73, 78, 80, 84, 89, and 313 or having up to two amino acid substitutions relative to the amino acid sequence of any one of SEQ ID NOs:13, 44, 50, 56, 61, 67, 73, 78, 80, 84, 89, and 313.

[0019] In some embodiments, the antibody or antigen-binding portion thereof comprises comprises one or more (e.g., one, two, three, four, five, or all six) CDRs selected from the group consisting of:
[0020] (a) a heavy chain CDR1 sequence comprising the amino acid sequence of any one of SEQ ID NOs:8, 36, 39, 45, 51, 57, 62, 68, 74, 81, 85, 307, and 315;
[0021] (b) a heavy chain CDR2 sequence comprising the amino acid sequence of any one of SEQ ID NOs:9, 37, 40, 46, 52, 58, 63, 75, 79, 82, 86, 308, and 316;
[0022] (c) a heavy chain CDR3 sequence comprising the amino acid sequence of any one of SEQ ID NOs: 10, 41, 47, 53, 59, 64, 70, 76, 83, 87, 309, and 317;
[0023] (d) a light chain CDR1 sequence comprising the amino acid sequence of any one of SEQ ID NOs:11, 42, 48, 54, 60, 65, 71, 77, 88, and 311;
[0024] (e) a light chain CDR2 sequence comprising the amino acid sequence of any one of SEQ ID NOs: 12, 38, 43, 49, 55, 66, 72, 312, and 319; and
[0025] (f) a light chain CDR3 sequence comprising the amino acid sequence of any one of SEQ ID NOs: 13, 44, 50, 56, 61, 67, 73, 78, 80, 84, 89, and 313.

[0026] In some embodiments, the antibody or antigen-binding portion thereof comprises:
[0027] (a) a heavy chain CDR1 sequence comprising the amino acid sequence of SEQ ID NO:8, a heavy chain CDR2 sequence comprising the amino acid sequence of SEQ ID NO:9, a heavy chain CDR3 sequence comprising the amino acid sequence of SEQ ID NO: 10, a light chain CDR1 sequence comprising the amino acid sequence of SEQ ID NO: 11, a light chain CDR2 sequence comprising the amino acid sequence of SEQ ID NO: 12, and a light chain CDR3 sequence comprising the amino acid sequence of SEQ ID NO: 13; or
[0028] (b) a heavy chain CDR1 sequence comprising the amino acid sequence of SEQ ID NO:36, a heavy chain CDR2 sequence comprising the amino acid sequence of SEQ ID NO:37, a heavy chain CDR3 sequence comprising the amino acid sequence of SEQ ID NO: 10, a light chain CDR1 sequence comprising the amino acid sequence of SEQ ID NO: 11, a light chain CDR2 sequence comprising the amino acid sequence of SEQ ID NO:38, and a light chain CDR3 sequence comprising the amino acid sequence of SEQ ID NO:13; or
[0029] (c) a heavy chain CDR1 sequence comprising the amino acid sequence of SEQ ID NO:39, a heavy chain CDR2 sequence comprising the amino acid sequence of SEQ ID NO:40, a heavy chain CDR3 sequence comprising the amino acid sequence of SEQ ID NO:41, a light chain CDR1 sequence comprising the amino acid sequence of SEQ ID NO:42, a light chain CDR2 sequence comprising the amino acid sequence of SEQ ID NO:43, and a light chain CDR3 sequence comprising the amino acid sequence of SEQ ID NO:44; or
[0030] (d) a heavy chain CDR1 sequence comprising the amino acid sequence of SEQ ID NO:45, a heavy chain CDR2 sequence comprising the amino acid sequence of SEQ ID NO:46, a heavy chain CDR3 sequence comprising the amino acid sequence of SEQ ID NO:47, a light chain CDR1 sequence comprising the amino acid sequence of SEQ ID NO:48, a light chain CDR2 sequence comprising the amino acid sequence of SEQ ID NO:49, and a light chain CDR3 sequence comprising the amino acid sequence of SEQ ID NO:50; or
[0031] (e) a heavy chain CDR1 sequence comprising the amino acid sequence of SEQ ID NO:51, a heavy chain CDR2 sequence comprising the amino acid sequence of SEQ ID NO:52, a heavy chain CDR3 sequence comprising the amino acid sequence of SEQ ID NO:53, a light chain CDR1 sequence comprising the amino acid sequence of SEQ ID NO:54, a light chain CDR2 sequence comprising the amino acid sequence of SEQ ID NO:55, and a light chain CDR3 sequence comprising the amino acid sequence of SEQ ID NO:56; or
[0032] (f) a heavy chain CDR1 sequence comprising the amino acid sequence of SEQ ID NO:57, a heavy chain CDR2 sequence comprising the amino acid sequence of SEQ ID NO:58, a heavy chain CDR3 sequence comprising the amino acid sequence of SEQ ID NO:59, a light chain CDR1 sequence comprising the amino acid sequence of SEQ ID NO:60, a light chain CDR2 sequence comprising the amino acid sequence of SEQ ID NO:38, and a light chain CDR3 sequence comprising the amino acid sequence of SEQ ID NO:61; or
[0033] (g) a heavy chain CDR1 sequence comprising the amino acid sequence of SEQ ID NO:62, a heavy chain CDR2 sequence comprising the amino acid sequence of SEQ ID NO:63, a heavy chain CDR3 sequence comprising the amino acid sequence of SEQ ID NO:64, a light chain CDR1 sequence comprising the amino acid sequence of SEQ ID NO:65, a light chain CDR2 sequence comprising the amino acid sequence of SEQ ID NO:66, and a light chain CDR3 sequence comprising the amino acid sequence of SEQ ID NO:67; or
[0034] (h) a heavy chain CDR1 sequence comprising the amino acid sequence of SEQ ID NO:68, a heavy chain CDR2 sequence comprising the amino acid sequence of SEQ ID NO:69, a heavy chain CDR3 sequence comprising the amino acid sequence of SEQ ID NO:70, a light chain CDR1 sequence comprising the amino acid sequence of SEQ ID NO:71, a light chain CDR2 sequence comprising the amino acid sequence of SEQ ID NO:72, and a light chain CDR3 sequence comprising the amino acid sequence of SEQ ID NO:73; or
[0035] (i) a heavy chain CDR1 sequence comprising the amino acid sequence of SEQ ID NO:74, a heavy chain CDR2 sequence comprising the amino acid sequence of SEQ ID NO:75, a heavy chain CDR3 sequence comprising the amino acid sequence of SEQ ID NO:76, a light chain CDR1 sequence comprising the amino acid sequence of SEQ ID NO:77, a light chain CDR2 sequence comprising the amino acid sequence of SEQ ID NO:38, and a light chain CDR3 sequence comprising the amino acid sequence of SEQ ID NO:78; or
[0036] (j) a heavy chain CDR1 sequence comprising the amino acid sequence of SEQ ID NO:74, a heavy chain CDR2 sequence comprising the amino acid sequence of SEQ ID NO:79, a heavy chain CDR3 sequence comprising the amino acid sequence of SEQ ID NO:76, a light chain CDR1 sequence comprising the amino acid sequence of SEQ ID NO:77, a light chain CDR2 sequence comprising the amino acid sequence of SEQ ID NO:38, and a light chain CDR3 sequence comprising the amino acid sequence of SEQ ID NO:80; or
[0037] (k) a heavy chain CDR1 sequence comprising the amino acid sequence of SEQ ID NO:81, a heavy chain CDR2 sequence comprising the amino acid sequence of SEQ ID NO:82, a heavy chain CDR3 sequence comprising the amino acid sequence of SEQ ID NO:83, a light chain CDR1 sequence comprising the amino acid sequence of SEQ ID NO:60, a light chain CDR2 sequence comprising the amino acid sequence of SEQ ID NO:38, and a light chain CDR3 sequence comprising the amino acid sequence of SEQ ID NO:84; or
[0038] (l) a heavy chain CDR1 sequence comprising the amino acid sequence of SEQ ID NO:85, a heavy chain CDR2 sequence comprising the amino acid sequence of SEQ ID NO:86, a heavy chain CDR3 sequence comprising the amino acid sequence of SEQ ID NO:87, a light chain CDR1 sequence comprising the amino acid sequence of SEQ ID NO:88, a light chain CDR2 sequence comprising the amino acid sequence of SEQ ID NO:38, and a light chain CDR3 sequence comprising the amino acid sequence of SEQ ID NO:89; or
[0039] (m) a heavy chain CDR1 sequence comprising the amino acid sequence of SEQ ID NO:307, a heavy chain CDR2 sequence comprising the amino acid sequence of SEQ ID NO:308, a heavy chain CDR3 sequence comprising the amino acid sequence of SEQ ID NO:309, a light chain CDR1 sequence comprising the amino acid sequence of SEQ ID NO:311, a light chain CDR2 sequence comprising the amino acid sequence of SEQ ID NO:312, and a light chain CDR3 sequence comprising the amino acid sequence of SEQ ID NO:313; or
[0040] (n) a heavy chain CDR1 sequence comprising the amino acid sequence of SEQ ID NO:315, a heavy chain CDR2 sequence comprising the amino acid sequence of SEQ ID NO:316, a heavy chain CDR3 sequence comprising the amino acid sequence of SEQ ID NO:317, a light chain CDR1 sequence comprising the amino acid sequence of SEQ ID NO:48, a light chain CDR2 sequence comprising the amino acid sequence of SEQ ID NO:319, and a light chain CDR3 sequence comprising the amino acid sequence of SEQ ID NO:50.

[0041] In some embodiments, the antibody or antigen-binding portion thereof comprises:
[0042] a heavy chain variable region comprising (i) an amino acid sequence that has at least 75% sequence identity to SEQ ID NO:6 and (ii) the CDR-H1, CDR-H2, and CDR-H3 of SEQ ID NOs:8, 9, and 10, respectively; and/or
[0043] a light chain variable region comprising (i) an amino acid sequence that has at least 75% sequence identity to SEQ ID NO:7 and (ii) the CDR-L1, CDR-L2, and CDR-L3 of SEQ ID NOs:11, 12, and 13, respectively.

[0044] In some embodiments, the antibody or antigen-binding portion thereof comprises a heavy chain variable region comprising an amino acid sequence that has at least 90% sequence identity to any one of SEQ ID NOs:6, 14, 15, 16, 17, 18, 19, 20, 21, 22, 23, 24, 306, and 314. In some embodiments, the antibody or antigen-binding portion thereof comprises a light chain variable region comprising an amino acid sequence that has at least 90% sequence identity to any one of SEQ ID NOs:7, 25, 26, 27, 28, 29, 30, 31, 32, 33, 34, 35, 310, and 318.

[0045] In some embodiments, the antibody or antigen-binding portion thereof comprises a heavy chain variable region comprising an amino acid sequence that has at least 90% sequence identity to any one of SEQ ID NOs:6, 14, 15, 16, 17, 18, 19, 20, 21, 22, 23, 24, 306, and 314 and comprises a light chain variable region comprising an amino acid sequence that has at least 90% sequence identity to any one of SEQ ID NOs:7, 25, 26, 27, 28, 29, 30, 31, 32, 33, 34, 35, 310, and 318.

[0046] In some embodiments, the antibody or antigen-binding portion thereof comprises:
[0047] (a) a heavy chain variable region comprising an amino acid sequence that has at least 90% sequence identity to SEQ ID NO:6; and a light chain variable region comprising an amino acid sequence that has at least 90% sequence identity to SEQ ID NO:7; or
[0048] (b) a heavy chain variable region comprising an amino acid sequence that has at least 90% sequence identity to SEQ ID NO:14; and a light chain variable region comprising an amino acid sequence that has at least 90% sequence identity to SEQ ID NO:25; or
[0049] (c) a heavy chain variable region comprising an amino acid sequence that has at least 90% sequence identity to SEQ ID NO:15; and a light chain variable region comprising an amino acid sequence that has at least 90% sequence identity to SEQ ID NO:26; or
[0050] (d) a heavy chain variable region comprising an amino acid sequence that has at least 90% sequence identity to SEQ ID NO:16; and a light chain variable region comprising an amino acid sequence that has at least 90% sequence identity to SEQ ID NO:27; or
[0051] (e) a heavy chain variable region comprising an amino acid sequence that has at least 90% sequence identity to SEQ ID NO:17; and a light chain variable region comprising an amino acid sequence that has at least 90% sequence identity to SEQ ID NO:28; or
[0052] (f) a heavy chain variable region comprising an amino acid sequence that has at least 90% sequence identity to SEQ ID NO:18; and a light chain variable region comprising an amino acid sequence that has at least 90% sequence identity to SEQ ID NO:29; or
[0053] (g) a heavy chain variable region comprising an amino acid sequence that has at least 90% sequence identity to SEQ ID NO:19; and a light chain variable region comprising an amino acid sequence that has at least 90% sequence identity to SEQ ID NO:30; or
[0054] (h) a heavy chain variable region comprising an amino acid sequence that has at least 90% sequence identity to SEQ ID N020; and a light chain variable region comprising an amino acid sequence that has at least 90% sequence identity to SEQ ID NO:31; or
[0055] (i) a heavy chain variable region comprising an amino acid sequence that has at least 90% sequence identity to SEQ ID NO:21; and a light chain variable region comprising an amino acid sequence that has at least 90% sequence identity to SEQ ID NO:32; or
[0056] (j) a heavy chain variable region comprising an amino acid sequence that has at least 90% sequence identity to SEQ ID NO:22; and a light chain variable region comprising an amino acid sequence that has at least 90% sequence identity to SEQ ID NO:33; or
[0057] (k) a heavy chain variable region comprising an amino acid sequence that has at least 90% sequence identity to SEQ ID NO:23; and a light chain variable region comprising an amino acid sequence that has at least 90% sequence identity to SEQ ID NO:34; or
[0058] (l) a heavy chain variable region comprising an amino acid sequence that has at least 90% sequence identity to SEQ ID NO:24; and a light chain variable region comprising an amino acid sequence that has at least 90% sequence identity to SEQ ID NO:35; or
[0059] (m) a heavy chain variable region comprising an amino acid sequence that has at least 90% sequence identity to SEQ ID NO:306, and a light chain variable region comprising an amino acid sequence that has at least 90% sequence identity to SEQ ID NO:310; or
[0060] (n) a heavy chain variable region comprising an amino acid sequence that has at least 90% sequence identity to SEQ ID NO:314, and a light chain variable region comprising an amino acid sequence that has at least 90% sequence identity to SEQ ID NO:318.

[0061] In some embodiments, in any of the anti-TREM2 antibodies described herein, the antibody comprises a first Fc polypeptide and optionally a second Fc polypeptide. In some embodiments, the antibody comprises a first Fc polypeptide and a second Fc polypeptide. In some embodiments, the first Fc polypeptide is a modified Fc polypeptide and/or the second Fc polypeptide is a modified Fc polypeptide.

[0062] In some embodiments, in any of the anti-TREM2 antibodies described herein, the antibody comprises:
[0063] (a) a first antigen-binding portion comprising a first variable region that specifically binds to a TREM2 protein (e.g., human TREM2), wherein the first antigen-binding portion comprises (i) a first heavy chain comprising a first Fc polypeptide and (ii) a first light chain; and
[0064] (b) a second antigen-binding portion comprising a second variable region that specifically binds to the TREM2 protein (e.g., human TREM2), wherein the second antigen-binding portion comprises (i) a second heavy chain comprising a first Fc polypeptide and (ii) a second light chain;
[0065] wherein the first Fc polypeptide and the second Fc polypeptide form an Fc dimer.

[0066] In some embodiments, the first Fc polypeptide is a modified Fc polypeptide and/or the second Fc polypeptide is a modified Fc polypeptide.

[0067] In some embodiments, the first variable region and the second variable region recognize the same epitope in the TREM2 protein. In some embodiments, the first variable region and the second variable region recognize different epitopes in the TREM2 protein.

[0068] In some embodiments, the first Fc polypeptide and the second Fc polypeptide each contain modifications that promote heterodimerization. In some embodiments, one of the Fc polypeptides has a T366W substitution and the other Fc polypeptide has T366S, L368A, and Y407V substitutions, according to EU numbering.

[0069] In some embodiments, the first Fc polypeptide and/or the second Fc polypeptide comprises a native FcRn binding site. In some embodiments, the first Fc polypeptide and/or the second Fc polypeptide comprises a modification that alters FcRn binding.

[0070] In some embodiments, the first Fc polypeptide and the second Fc polypeptide do not have effector function. In some embodiments, the first Fc polypeptide and/or the second Fc polypeptide comprises a modification that reduces effector function. In some embodiments, the modification that reduces effector function comprises substitutions of Ala at position 234 and Ala at position 235, according to EU numbering.

[0071] In some embodiments, the first Fc polypeptide and/or the second Fc polypeptide comprises amino acid changes relative to the native Fc sequence that extend serum half-life. In some embodiments, the amino acid changes comprise substitutions of Tyr at position 252, Thr at position 254, and Glu at position 256, according to EU numbering. Alternatively, in other embodiments, the amino acid changes comprise substitutions of Leu at position 428 and Ser at position 434, according to EU numbering. Alternatively, in further embodiments, the amino acid changes comprise a substitution of Ser or Ala at position 434, according to EU numbering.

[0072] In some embodiments, the first Fc polypeptide and/or the second Fc polypeptide specifically binds to the transferrin receptor. In some embodiments, the first Fc polypeptide and/or the second Fc polypeptide comprises at least two substitutions at positions selected from the group consisting of 384, 386, 387, 388, 389, 390, 413, 416, and 421, according to EU numbering. In some embodiments, the first Fc polypeptide and/or the second Fc polypeptide comprises substitutions at at least three, four, five, six, seven, eight, or nine of the positions.

[0073] In some embodiments, the first Fc polypeptide and/or the second Fc polypeptide further comprises one, two, three, or four substitutions at positions comprising 380, 391, 392, and 415, according to EU numbering. In some embodiments, the first Fc polypeptide and/or the second Fc polypeptide further comprises one, two, or three substitutions at positions comprising 414, 424, and 426, according to EU numbering.

[0074] In some embodiments, the first Fc polypeptide and/or the second Fc polypeptide comprises Trp at position 388. In some embodiments, the first Fc polypeptide and/or the second Fc polypeptide comprises an aromatic amino acid at position 421. In some embodiments, the aromatic amino acid at position 421 is Trp or Phe.

[0075] In some embodiments, the first Fc polypeptide and/or the second Fc polypeptide comprises at least one position selected from the following: position 380 is Trp, Leu, or Glu; position 384 is Tyr or Phe; position 386 is Thr; position 387 is Glu; position 388 is Trp; position 389 is Ser, Ala, Val, or Asn; position 390 is Ser or Asn; position 413 is Thr or Ser; position 415 is Glu or Ser; position 416 is Glu; and position 421 is Phe.

[0076] In some embodiments, the first Fc polypeptide and/or the second Fc polypeptide comprises 2, 3, 4, 5, 6, 7, 8, 9, 10, or 11 positions selected from the following: position 380 is Trp, Leu, or Glu; position 384 is Tyr or Phe; position 386 is Thr; position 387 is Glu; position 388 is Trp; position 389 is Ser, Ala, Val, or Asn; position 390 is Ser or Asn; position 413 is Thr or Ser; position 415 is Glu or Ser; position 416 is Glu; and position 421 is Phe.

[0077] In some embodiments, the first Fc polypeptide and/or the second Fc polypeptide comprises 11 positions as follows: position 380 is Trp, Leu, or Glu; position 384 is Tyr or Phe; position 386 is Thr; position 387 is Glu; position 388 is Trp; position 389 is Ser, Ala, Val, or Asn; position 390 is Ser or Asn; position 413 is Thr or Ser; position 415 is Glu or Ser; position 416 is Glu; and position 421 is Phe.

[0078] In some embodiments, the first Fc polypeptide and/or the second Fc polypeptide has a CH3 domain with at least 85% identity, at least 90% identity, or at least 95% identity to amino acids 111-217 of any one of SEQ ID NOs:100-185, 219-298, and 337-460. In some embodiments, the first Fc polypeptide and/or the second Fc polypeptide comprises the amino acid sequence of any one of SEQ ID NOs:100-185, 219-298, and 337-460. In some embodiments, the residues for at least 5, 6, 7, 8, 9, 10, 11, 12, 13, 14, 15, or 16 of the positions corresponding to EU index positions 380, 384, 386, 387, 388, 389, 390, 391, 392, 413, 414, 415, 416, 421, 424 and 426 of any one of SEQ ID NOs:100-185, 219-298, and 337-460 are not deleted or substituted.

[0079] In some embodiments, in any of the anti-TREM2 antibodies described herein, the antibody comprises an Fc polypeptide selected from the group consisting of SEQ ID NOs:219-298 and 351-460. In some embodiments, the antibody comprises a first Fc polypeptide selected from the group consisting of SEQ ID NOs:219, 220, 221, 222, 227, 228, 229, 230, 231, 232, 239, 240, 241, 242, 243, 244, 251, 252, 253, 254, 255, 256, 263, 264, 265, 266, 267, 268, 275, 276, 277, 278, 279, 280, 287, 288, 289, 290, 291, 292, 351, 352, 355, 356, 357, 358, 359, 360, 367, 368, 369, 370, 371, 372, 379, 380, 381, 382, 383, 384, 392, 393, 394, 399, 400, 401, 406, 407, 408, 413, 414, 415, 420, 421, 422, 427, 428, 429, 434, 435, 436, 441, 442, 443, 448, 449, 450, 455, 456, and 457, and a second Fc polypeptide selected from the group consisting of SEQ ID NOs:223, 224, 225, 226, 233, 234, 235, 236, 237, 238, 245, 246, 247, 248, 249, 250, 257, 258, 259, 260, 261, 262, 269, 270, 271, 272, 273, 274, 281, 282, 283, 284, 285, 286, 293, 294, 295, 296, 297, 298, 353, 354, 361, 362, 363, 364, 365, 366, 373, 374, 375, 376, 377, 378, 385, 386, 387, 388, 389, 390, 395, 396, 397, 402, 403, 404, 409, 410, 411, 416, 417, 418, 423, 424, 425, 430, 431, 432, 437, 438, 439, 444, 445, 446, 451, 452, 453, 458, 459, and 460. In some embodiments, the antibody comprises a first Fc polypeptide selected from the group consisting of SEQ ID NOs:219, 220, 221, 222, 351, 352, 406, 407, and 408 and a second Fc polypeptide selected from the group consisting of SEQ ID NOs:223, 224, 225, 226, 353, 354, 409, 410, and 411. In some embodiments, the antibody comprises a first Fc polypeptide selected from the group consisting of SEQ ID NOs:227, 228, 229, 230, 231, 232, 392, 393, and 394 and a second Fc polypeptide selected from the group consisting of SEQ ID NOs:233, 234, 235, 236, 237, 238, 395, 396, and 397. In some embodiments, the antibody comprises a first Fc polypeptide selected from the group consisting of SEQ ID NOs:239, 240, 241, 242, 243, 244, 434, 435, and 436 and a second Fc polypeptide selected from the group consisting of SEQ ID NOs:245, 246, 247, 248, 249, 250, 437, 438, and 439. In some embodiments, the antibody comprises a first Fc polypeptide selected from the group consisting of SEQ ID NOs:251, 252, 253, 254, 255, 256, 448, 449, and 450 and a second Fc polypeptide selected from the group consisting of SEQ ID NOs:257, 258, 259, 260, 261, 262, 451, 452, and 453. In some embodiments, the antibody comprises a first Fc polypeptide selected from the group consisting of SEQ ID NOs:263, 264, 265, 266, 267, 268, 455, 456, and 457 and a second Fc polypeptide selected from the group consisting of SEQ ID NOs:269, 270, 271, 272, 273, 274, 458, 459, and 460. In some embodiments, the antibody comprises a first Fc polypeptide selected from the group consisting of SEQ ID NOs:275, 276, 277, 278, 279, 280, 413, 414, and 415 and a second Fc polypeptide selected from the group consisting of SEQ ID NOs:281, 282, 283, 284, 285, 286, 416, 417, and 418. In some embodiments, the antibody comprises a first Fc polypeptide selected from the group consisting of SEQ ID NOs:287, 288, 289, 290, 291, 292, 420, 421, and 422 and a second Fc polypeptide selected from the group consisting of SEQ ID NOs:293, 294, 295, 296, 297, 298, 423, 424, and 425. In some embodiments, the antibody comprises a first Fc polypeptide selected from the group consisting of SEQ ID NOs:355, 356, 357, 358, 360, 399, 400, and 401 and a second Fc polypeptide selected from the group consisting of SEQ ID NOs:361, 362, 363, 364, 365, 366, 402, 403, and 404. In some embodiments, the antibody comprises a first Fc polypeptide selected from the group consisting of SEQ ID NOs:367, 368, 369, 370, 371, 372, 441, 442, and 443 and a second Fc polypeptide selected from the group consisting of SEQ ID NOs:373, 374, 375, 376, 377, 378, 444, 445, and 446. In some embodiments, the antibody comprises a first Fc polypeptide selected from the group consisting of SEQ ID NOs:379, 380, 381, 382, 383, 384, 427, 428, and 429 and a second Fc polypeptide selected from the group consisting of SEQ ID NOs:385, 386, 387, 388, 389, 390, 430, 431, and 432.

[0080] In some embodiments, the first Fc polypeptide and/or the second Fc polypeptide binds to the apical domain of the transferrin receptor. In some embodiments, the binding of the bispecific antibody to the transferrin receptor does not substantially inhibit binding of transferrin to the transferrin receptor.

[0081] In some embodiments, the first Fc polypeptide and/or the second Fc polypeptide has an amino acid sequence identity of at least 75%, or at least 80%, 90%, 92%, or 95%, as compared to the corresponding wild-type Fc polypeptide (e.g., a wild-type Fc polypeptide that is a human IgG1, IgG2, IgG3, or IgG4 Fc polypeptide).

[0082] In some embodiments, uptake of the antibody or antigen-binding portion thereof into the brain is greater than the uptake of the antibody or antigen-binding portion thereof without the modifications in the first Fc polypeptide and/or the second Fc polypeptide that result in transferrin receptor binding. In some embodiments, uptake of the antibody or antigen-binding portion thereof into the brain is at least 2, 3, 4, 5, 6, 7, 8, 9, 10, 15, 20, 25, 30, 35, 40, 45, 50, 55, 60, 65, 70, 75, 80, 85, 90, 95, or 100-fold greater as compared to the uptake of the antibody or antigen-binding portion thereof without the modifications in the first Fc polypeptide and/or the second Fc polypeptide that result in transferrin receptor binding.

[0083] In some embodiments, one of the Fc polypeptides is not modified to bind to a blood-brain barrier receptor and the other Fc polypeptide is modified to specifically bind to a transferrin receptor.

[0084] In some embodiments, the antibody or antigen-binding portion thereof exhibits cross-reactivity with a mouse TREM2 protein. In some embodiments, the antibody is a chimeric antibody. In some embodiments, the antibody is a humanized antibody. In some embodiments, the antibody is a fully human antibody. In some embodiments, the antigen-binding portion is a Fab, a F(ab′)2, a scFv, or a bivalent scFv.

[0085] In another aspect, antigen-binding fragments that specifically bind to a TREM2 protein (e.g., human TREM2) are provided. In some embodiments, the antigen-binding fragment further comprises an Fc polypeptide. In some embodiments, the Fc polypeptide is a modified Fc polypeptide. In some embodiments, the Fc polypeptide contains one or more of the modifications described herein, e.g., to promote heterodimerization, reduce effector function, extend serum half-life, and/or bind to a transferrin receptor. As a non-limiting example, the antigen-binding fragment may include a Fab fragment that further comprises an Fc polypeptide, e.g., an Fab-Fc fusion. In other embodiments, the antigen-binding fragment further comprises a first Fc polypeptide and a second Fc polypeptide. In some embodiments, the first Fc polypeptide is a modified Fc polypeptide and/or the second Fc polypeptide is a modified Fc polypeptide. In some embodiments, the first Fc polypeptide and/or the second Fc polypeptide contains one or more of the modifications described herein, e.g., to promote heterodimerization, reduce effector function, extend serum half-life, and/or bind to a transferrin receptor. As a non-limiting example, the antigen-binding fragment may include a F(ab′)2 fragment that further comprises a first Fc polypeptide and a second Fc polypeptide, e.g., an F(ab′)2-Fc fusion.

[0086] In some embodiments, the antibody or antigen-binding portion thereof is a multispecific antibody. In some embodiments, the multispecific antibody is a bispecific antibody. In some embodiments, the bispecific antibody recognizes two different TREM2 epitopes. In some embodiments, the bispecific antibody is capable of inducing TREM2 clustering at the surface of a cell. In some embodiments, the bispecific antibody has an EC₅₀ that is at least 2-fold (e.g., at least 5-fold, 10-fold, 20-fold, 30-fold, 50-fold, 100-fold, 200-fold, 500-fold, or 1000-fold) lower than a bivalent monospecific antibody comprising the same sequence as a single arm of the bispecific antibody. In some embodiments, each of the two arms of the bispecific antibody is selected from an antibody clone selected from the group consisting of 2G4.B1, 3D3.A1, 7B10.A2, 8A11.B1, 13B11.A1, 14D5.F1, 14H11.A1, 19F10.F3, 21D4.D1, 21D6.G2, 21D11, 22B8.B1, 22G9.D1, 24B4.A1, 26D2.D1, 26D5.A1, 26D11.B1, 26E2.A3, 30A8.A1, 30F2.A2, 38E9.E5, 39H10.A1, 40H3.A4, 42E8.H1, 43E9.H1, 44E2.H1, 44E3.B1, 49H11.B1, 51D4, 52H9.D1, 53H11.D3, 54C2.A1, 55B9.A1, 57D7.A1, 59C6.F1, 60A4.B1, RS9.E2, RS9.F6, RS9.F10, RS11.1F5, RS11.1G6, RS11.1A10, RS11.1D11, RS11.4A5, RS11.4H6, RS11.4D7, RS11.4D9, RS11.4F11, RS12.1C6, RS12.1C10, RS12.2D1, RS12.2D4, RS12.2E1, RS12.2F2, RS12.2G1, RS12.2H1, and RS12.3C10, wherein the two arms are in different epitope bins.

[0087] In another aspect, pharmaceutical compositions are provided. In some embodiments, the pharmaceutical composition comprises an antibody or antigen-binding portion thereof that specifically binds to human TREM2. In some embodiments, the pharmaceutical composition comprises an antibody or antigen-binding portion thereof that has one or more TREM2-associated activities as described herein, recognizes an epitope of human TREM2 that is the same or substantially the same as an epitope recognized by an antibody clone as described herein, and/or comprises one or more CDR, heavy chain, and/or light chain sequences of an antibody clone as described herein.

[0088] In another aspect, isolated polynucleotides are provided. In some embodiments, the isolated polynucleotide comprises a nucleotide sequence encoding an isolated antibody or antigen-binding portion thereof that specifically binds to human TREM2 as described herein. In another aspect, vectors and host cells comprising such an isolated polynucleotide are provided.

[0089] In still another aspect, antibodies are provided that compete with an antibody clone as described herein (e.g., an antibody clone selected from the group consisting of 2G4.B1, 3D3.A1, 7B10.A2, 8A11.B1, 13B11.A1, 14D5.F1, 14H11.A1, 19F10.F3, 21D4.D1, 21D6.G2, 21D11, 22B8.B1, 22G9.D1, 24B4.A1, 26D2.D1, 26D5.A1, 26D11.B1, 26E2.A3, 30A8.A1, 30F2.A2, 38E9.E5, 39H10.A1, 40H3.A4, 42E8.H1, 43E9.H1, 44E2.H1, 44E3.B1, 49H11.B1, 51D4, 52H9.D1, 53H11.D3, 54C2.A1, 55B9.A1, 57D7.A1, 59C6.F1, 60A4.B1, RS9.E2, RS9.F6, RS9.F10, RS11.1F5, RS11.1G6, RS11.1A10, RS11.1D11, RS11.4A5, RS11.4H6, RS11.4D7, RS11.4D9, RS11.4F11, RS12.1C6, RS12.1C10, RS12.2D1, RS12.2D4, RS12.2E1, RS12.2F2, RS12.2G1, RS12.2H1, and RS12.3C10) for specific binding to human TREM2.

[0090] In yet another aspect, kits are provided for therapeutic and prognostic use as described herein. In some embodiments, the kit comprises an isolated antibody or antigen-binding portion thereof that specifically binds to human TREM2 as described herein, and further comprises instructions for therapeutic or prognostic use.

[0091] In another aspect, methods of treating a neurodegenerative disease are provided. In some embodiments, the method comprises administering to a subject having a neurodegenerative disease an antibody or pharmaceutical composition as described herein. In some embodiments, the neurodegenerative disease is selected from the group consisting of Alzheimer's disease, primary age-related tauopathy, progressive supranuclear palsy (PSP), frontotemporal dementia, frontotemporal dementia with parkinsonism linked to chromosome 17, argyrophilic grain dementia, amyotrophic lateral sclerosis, amyotrophic lateral sclerosis/parkinsonism-dementia complex of Guam (ALS-PDC), corticobasal degeneration, chronic traumatic encephalopathy, Creutzfeldt-Jakob disease, dementia pugilistica, diffuse neurofibrillary tangles with calcification, Down's syndrome, familial British dementia, familial Danish dementia, Gerstmann-Straussler-Scheinker disease, globular glial tauopathy, Guadeloupean parkinsonism with dementia, Guadelopean PSP, Hallevorden-Spatz disease, hereditary diffuse leukoencephalopathy with spheroids (HDLS), Huntington's disease, inclusion-body myositis, multiple system atrophy, myotonic dystrophy, Nasu-Hakola disease, neurofibrillary tangle-predominant dementia, Niemann-Pick disease type C, pallido-ponto-nigral degeneration, Parkinson's disease, Pick's disease, postencephalitic parkinsonism, prion protein cerebral amyloid angiopathy, progressive subcortical gliosis, subacute sclerosing panencephalitis, and tangle only dementia. In some embodiments, the neurodegenerative disease is Alzheimer's disease.

[0092] In still another aspect, methods of decreasing levels of sTREM2 in a subject having a neurodegenerative disease are provided. In some embodiments, the method comprises administering to the subject an antibody or pharmaceutical composition as described herein.

[0093] In yet another aspect, methods of increasing levels of sTREM2 in a subject having a neurodegenerative disease are provided. In some embodiments, the method comprises administering to the subject an antibody or pharmaceutical composition as described herein.

[0094] In yet another aspect, methods of enhancing TREM2 activity in a subject having a neurodegenerative disease are provided. In some embodiments, the method comprises administering to the subject an antibody or pharmaceutical composition as described herein. In some embodiments, the antibody is an antibody that enhances TREM2 activity in the presence of a TREM2 ligand. In some embodiments, the antibody is an antibody that enhances TREM2 activity in the presence but not the absence of a TREM2 ligand.

[0095] In still another aspect, methods of inhibiting TREM2 activity in a subject having a neurodegenerative disease are provided. In some embodiments, the method comprises administering to the subject an antibody or pharmaceutical composition as described herein. In some embodiments, the antibody is an antibody that inhibits TREM2 activity in the presence of a TREM2 ligand. In some embodiments, the antibody is an antibody that inhibits TREM2 activity in the presence but not the absence of a TREM2 ligand. In some embodiments, the antibody is an antibody that inhibits TREM2 activity in the absence of a TREM2 ligand and inhibits ligand activation of TREM2.

[0096] In still another aspect, methods of reducing plaque accumulation in a subject having a neurodegenerative disease are provided. In some embodiments, the method comprises administering to the subject an antibody or pharmaceutical composition as described herein. In some embodiments, the subject has Alzheimer's disease.

[0097] In yet another aspect, methods of identifying a subject having a neurodegenerative disease as a candidate for treatment with an anti-TREM2 antibody are provided.

[0098] In some embodiments, the method comprises:
[0099] measuring the level of sTREM2 in a sample from the subject;
[0100] comparing the level of sTREM2 in the sample from the subject to a control value, wherein a level of sTREM2 in the sample from the subject that is elevated relative to the control value identifies the subject as a candidate for treatment; and
[0101] for a subject identified as a candidate for treatment, administering to the subject an isolated antibody or an antigen-binding portion thereof that specifically binds to a human TREM2 protein (e.g., any antibody described herein). In some embodiments, the isolated antibody or antigen-binding portion thereof is an antibody that decreases levels of sTREM2.

[0102] In some embodiments, the method comprises:
[0103] measuring the level of sTREM2 in a sample from the subject;
[0104] comparing the level of sTREM2 in the sample from the subject to a control value, wherein a level of sTREM2 in the sample from the subject that is reduced relative to the control value identifies the subject as a candidate for treatment; and
[0105] for a subject identified as a candidate for treatment, administering to the subject an isolated antibody or an antigen-binding portion thereof that specifically binds to a human TREM2 protein (e.g., any antibody described herein). In some embodiments, the isolated antibody or antigen-binding portion thereof is an antibody that increases levels of sTREM2.

[0106] In another aspect, methods of treating a subject having a neurodegenerative disease that has been identified as a candidate for treatment with an anti-TREM2 antibody are provided. In some embodiments, the method comprises:
[0107] administering to the subject an isolated antibody or an antigen-binding portion thereof that specifically binds to a human TREM2 protein (e.g., any antibody described herein), wherein the subject has been identified as having an increased level of sTREM2, relative to a control value. In some embodiments, the isolated antibody or antigen-binding portion thereof is an antibody that decreases levels of sTREM2.

[0108] In some embodiments, the method comprises:
[0109] administering to the subject an isolated antibody or an antigen-binding portion thereof that specifically binds to a human TREM2 protein (e.g., any antibody described herein), wherein the subject has been identified as having a reduced level of sTREM2, relative to a control value. In some embodiments, the isolated antibody or antigen-binding portion thereof is an antibody that increases levels of sTREM2.

[0110] In still another aspect, methods of monitoring the efficacy of treatment with an anti-TREM2 antibody for a subject having a neurodegenerative disease are provided. In some embodiments, the method comprises:
[0111] measuring the level of sTREM2 in a first sample from the subject taken prior to an administration of an anti-TREM2 antibody (e.g., the first administration to the subject);
[0112] treating the subject with an isolated antibody or an antigen-binding portion thereof that specifically binds to a human TREM2 protein (e.g., any antibody described herein); and
[0113] measuring the level of sTREM2 in a second sample from the subject taken subsequent to the administration of the anti-TREM2 antibody;
[0114] wherein a change in sTREM2 level in the second sample from the subject, as compared to the first sample from the subject, indicates that the subject is responding to treatment with the anti-TREM2 antibody.

[0115] In some embodiments, a decrease in sTREM2 level in the second sample from the subject, as compared to the first sample from the subject, indicates that the subject is responding to treatment with the anti-TREM2 antibody. In some embodiments, an increase in sTREM2 level in the second sample from the subject, as compared to the first sample from the subject, indicates that the subject is responding to treatment with the anti-TREM2 antibody.

### BRIEF DESCRIPTION OF THE DRAWINGS

[0116] FIGS. 1A-1D. Anti-TREM2 antibodies bind surface TREM2 on cells. (A) Anti-TREM2 antibodies were screened for binding to HEK cells expressing human TREM2 (unlabeled) and mouse TREM2 HEK expressing cells (labeled with NucBlue). Antibody binding was detected with a secondary anti-mouse multiple adsorption antibody conjugated to APC. RS9.F6 demonstrates binding to both mouse and human TREM2 cells. 57D7.A1 binds specifically to human TREM2 cells. (B) Parental HEK-GFP cells were used as a negative control to rule out non-specific binding. (C) Anti-TREM2 antibody surface binding dose response in hTREM2-HEK cells. Anti-TREM2 antibodies were titrated for binding to HEK cells expressing human TREM2. Antibody binding was detected with a secondary anti-mouse multiple adsorption antibody conjugated to APC. RS9.F6 and RS9.F10 demonstrates <2 nM EC50 binding to human TREM2 cells. (D) Anti-TREM2 antibody surface binding dose response in mTREM2-293F cells. Mouse TREM2 HEK cells were titrated for binding as in (C). RS9.F6 and RS9.F10 demonstrates <8 nM EC50 binding to mouse TREM2 HEK cells.

[0117] FIG. 2. Anti-TREM2 antibody binding to primary human macrophages. Anti-TREM2 antibodies were screened for binding to primary human monocyte derived macrophages by FACS. Antibody binding was detected with a secondary anti-mouse multiple adsorption antibody conjugated to APC. Gray line=secondary antibody alone. Black line=TREM2 antibody.

[0118] FIGS. 3A-3C. P-Syk activation by anti-TREM2 antibodies. (A) Anti-TREM2 antibodies were added at 30 nM to human TREM2 expressing HEK cells induce pSyk as calculated by fold over buffer control. (B-C) P-Syk activation dose response was determined for anti-TREM2 antibodies. Anti-TREM2 antibodies were dose titrated on human TREM2 expressing HEK cells and pSyk induction was calculated by fold over buffer control. EC50 values show nM potency and fold induction of pSyk for each antibody.

[0119] FIG. 4. Modulation of soluble TREM2 by anti-TREM2 antibodies. Human TREM2-expressing cells were treated overnight (18 hours) with antibody in solution at the indicated concentration. Soluble TREM2 concentrations were measured by ELISA after denaturation in SDS. Absolute quantities of sTREM2 were determined based on a standard curve. Data was fit with a four-parameter logistic equation.

[0120] FIGS. 5A-5B. Anti-TREM2 antibodies induce survival of human macrophages. Human monocytes isolated from peripheral blood were incubated with 5 ng/mL M-CSF (A) or no M-CSF (B) in the presence of titrated concentrations of plate coated anti-TREM2 antibodies or isotype controls. On day 6 cell viability was determined by CellTiter Glo viability assay. Anti-TREM2 antibodies increased survival of human macrophages cultured in restricted or no M-CSF.

[0121] FIGS. 6A-6D. Anti-TREM2 antibody induced signaling pathways. (A-D) Human macrophages were stimulated with 30 nM antibody or control for 15 minutes. Cell lysates were measured for p-Y525/526-SYK (A), p-T202/Y204-ERK1/2 (B), p-S9-GSK3-beta (C), and p-S473-AKT (D) by Alpha-LISA. Anti-TREM2 antibodies induced Syk phosphorylation, ERK phosphorylation, GSK3-beta phosphorylation, and AKT phosphorylation.

[0122] FIG. 7. Anti-TREM2 antibody epitope bins. Anti-TREM2 antibody epitopes were characterized by competitive binning and demonstrate numerous epitope bins. Cross-competition was assessed using biotinylated detection antibodies and binding was measured with streptavidin-conjugated reagents in an ELISA format. Distance of connecting lines indicate similarity of bin. Circular lines note self-competition which serves as a positive control validating the method.

[0123] FIGS. 8A-8C. TREM2 p-Syk induction by novel lipid ligands. (A-B) HEK293 cells stably overexpressing human TREM2 (black bars) and DAP12 (gray bars) (A), or mutant TREM2 R47H (black bars) and DAP12 (gray bars) (B) were stimulated with liposomes containing 30% of the indicated lipids and 70% phosphatidylcholine (PC) at 0.5 mg/mL, except Kdo2-Lipid A (KLA) which contains 10% KLA and 90% PC. pSyk was measured by AlphaLISA, and data are shown as fold change over buffer control (HBSS). Bars represent mean±standard deviation from 1-2 independent experiments. (C) Human macrophages were stimulated with liposomes containing 30% of the indicated lipids and 70% phosphatidylcholine (PC) at 0.5 mg/mL, except Kdo2-Lipid A (KLA) which contains 10% KLA and 90% PC. pSyk was measured by AlphaLISA and data is graphed as fold change over buffer control. Data points represent average value of 2-3 technical replicates from 3 independent human donors. Bars represent mean+standard deviation. ***p<0.001, **p<0.01, *p<0.05 by one-way ANOVA comparison to 100% PC liposomes with Dunnett's posthoc test. See Table 9 for key of lipid abbreviations.

[0124] FIGS. 9A-9G. Characterization of anti-TREM2 antibodies' interaction with lipid ligand to activate or block p-Syk. (A) Antibody induction of pSyk in the presence of TREM2 lipid ligand. Anti-TREM2 antibodies dosed at 30 nM on human TREM2 expressing HEK cells either with or without EC20 (0.046 mg/mL), EC50 (0.212 mg/mL), or EC80 (0.967 mg/mL) concentrations of liposomes containing 30% phosphatidylserine (PS)/70% phosphatidylcholine (PC). pSyk activation was calculated by fold over buffer alone control. 21D6.G2 and 3D3.A1 define a class of TREM2 antibody that are additive with lipid TREM2 activators. (B) Antibody induction of pSyk in the presence of TREM2 lipid ligand. Anti-TREM2 antibodies dosed at 10 nM on human macrophages either with or without EC20 (0.046 mg/mL), EC50 (0.212 mg/mL), or EC80 (0.967 mg/mL) concentrations of liposomes containing 30% phosphatidylserine (PS)/70% phosphatidylcholine (PC). The signal due to liposomes alone was subtracted at each value to determine if the antibodies have a synergistic, neutral, or inhibitor effect on lipid ligand driven pSyk activation. (C) Anti-TREM2 antibodies (30 nM) or buffer was incubated with human macrophages for 30 minutes at 37° C., antibody was removed, then liposomes or buffer was added for 5 minutes at 37° C. Detection of pSyk by AlphaLISA on lysed cells was used to determine antibodies that synergize with liposome ligand or block liposome ligand. (D) Percentage of inhibition or synergy was determined by quantifying the extent to which pre-incubating the cells with antibody resulted in blocking or enhanced liposome mediated pSyk signaling. 100% inhibition was defined as entirely blocking the liposome mediated increase in pSyk. (E) Antibody inhibition of pSyk in the presence of TREM2 lipid ligand. 21D4 significantly reduced TREM2 activation by liposomes as compared to controls. (F-G) Antibody inhibition by antibodies 21D4 (F) and 21D11 (G) at increasing antibody concentrations.

[0125] FIGS. 10A-10C. ATV-Anti-TREM2 Biacore analysis for TREM2 and hTfR binding. (A) TREM2 binding of RS9.F6/3C35.21.17_LALAPG. (B) TREM2 binding of RS9.F6. (C) Human TfR binding of RS9.F6/3C35.21.17_LALAPG.

[0126] FIGS. 11A-11D. Differential heat map comparing time-course hydrogen/deuterium exchange of TREM2 alone to time-course hydrogen/deuterium exchange of TREM2 and F6 Fab mixture for peptides derived from TREM2. (A) Differential heat map over the length of the TREM2 protein of SEQ ID NO:465. The residues of the TREM2 protein are indicated at the top of the heat map. Residues 1-37, which were not covered by the TREM2-derived peptides, are not shown. (B-D) Heat maps showing portions of the differential heat map shown in (A). (B) Differential heat map showing residues 1-68 of the TREM2 protein. (C) Differential heat map showing residues 69-144 of the TREM2 protein. (D) Differential heat map showing residues 145-193 of the TREM2 protein.

[0127] FIGS. 12A-12B. F6 Fab-TREM2 peptide co-complex structures. (A) Cartoon representation of the Fab:peptide complex. Shown are the Fab light chain (VL, left), the Fab heavy chain (VH, right), and the TREM2 peptide (center). (B) Interactions at the binding site. Shown are the TREM2 peptide (center), the light chain (left), and the heavy chain (right). Sequential numbering of Fab residues.

[0128] FIGS. 13A-13B. F6-TREM2 complex interface residues. (A) Amino acid sequences of the F6 Fab light chain variable domain (residues 1-112 of SEQ ID NO: 112) and heavy chain variable domain (SEQ ID NO:24) with Chothia numbering. CDRs in Kabat definition are underscored. Residues in direct contact with TREM2 peptide are in red. (B) Direct contacts between TREM2 peptide and Fab. Peptide residues are in circles, and Fab residues are in boxes. Sequential numbering of Fab residues.

### DETAILED DESCRIPTION

### I. Introduction

[0129] Triggering receptor expressed on myeloid cells-2 (TREM2) is a transmembrane receptor that is expressed on the cell surface of microglia, dendritic cells, macrophages, and osteoclasts. Without being bound to a particular theory, it is believed that upon ligand binding, TREM2 forms a signaling complex with a transmembrane adapter protein, DNAX-activating protein 12 (DAP12), which in turn is tyrosine phosphorylated by the protein kinase SRC. It is believed that the activated TREM2/DAP12 signaling complex mediates intracellular signaling by recruiting and phosphorylating kinases such as Syk kinase.

[0130] TREM2/DAP12 signaling modulates activities such as phagocytosis, cell growth and survival, pro-inflammatory cytokine secretion, and the migration of cells such as microglia and macrophages.

[0131] TREM2 undergoes regulated intramembrane proteolysis, in which the membrane-associated full-length TREM2 is cleaved by the metalloprotease ADAM10 into a sTREM2 portion that is shed from the cell and a membrane-retained C-terminal fragment that is further degraded by a gamma-secretase. Altered levels of sTREM2 have been reported in patients having Alzheimer's disease or frontotemporal dementia and having a mutation in TREM2. Additionally, mutations in TREM2 are associated with altered functions such as impaired phagocytosis and reduced microglial function.

[0132] As detailed in the Examples section below, antibodies have been generated that specifically bind to human TREM2 and that modulate one or more downstream functions of the TREM2/DAP12 signaling complex, such as phosphorylation of Syk kinase. Accordingly, in one aspect, the present disclosure provides anti-TREM2 antibodies and antigen-binding portions thereof.

[0133] In some embodiments, the anti-TREM2 antibodies enhance TREM2 activity. Thus, in another aspect, methods of enhancing TREM2 activity, for example in a subject having a neurodegenerative disease, are provided.

[0134] In some embodiments, the anti-TREM2 antibodies inhibit TREM2 activity. Thus, in another aspect, methods of inhibiting TREM2 activity, for example in a subject having a neurodegenerative disease, are provided.

[0135] In some embodiments, the anti-TREM2 antibodies of the disclosure reduce shedding of sTREM2. Thus, in yet another aspect, methods of decreasing levels of sTREM2, for example in a subject having a neurodegenerative disease, are provided.

[0136] In some embodiments, the anti-TREM2 antibodies of the disclosure increase shedding of sTREM2. Accordingly, in still another aspect, methods of increasing levels of sTREM2, for example in a subject having a neurodegenerative disease, are provided.

### II. Definitions

[0137] As used herein, the singular forms “a,” “an” and “the” include plural referents unless the content clearly dictates otherwise. Thus, for example, reference to “an antibody” optionally includes a combination of two or more such molecules, and the like.

[0138] As used herein, the terms “about” and “approximately,” when used to modify an amount specified in a numeric value or range indicate that the numeric value as well as reasonable deviations from the value known to the skilled person in the art, for example ±20%, ±10%, or ±5%, are within the intended meaning of the recited value.

[0139] As used herein, the term “TREM2 protein” refers to a triggering receptor expressed on myeloid cells 2 protein that is encoded by the gene Trem2. As used herein, a “TREM2 protein” refers to a native (i.e., wild-type) TREM2 protein of any vertebrate, such as but not limited to human, non-human primates (e.g., cynomolgus monkey), rodents (e.g., mice, rat), and other mammals. In some embodiments, a TREM2 protein is a human TREM2 protein having the sequence identified in UniprotKB accession number Q9NZC2 (SEQ ID NO:96).

[0140] As used herein, the term “anti-TREM2 antibody” refers to an antibody that specifically binds to a TREM2 protein (e.g., human TREM2).

[0141] As used herein, the term “antibody” refers to a protein with an immunoglobulin fold that specifically binds to an antigen via its variable regions. The term encompasses intact polyclonal antibodies, intact monoclonal antibodies, single chain antibodies, multispecific antibodies such as bispecific antibodies, monospecific antibodies, monovalent antibodies, chimeric antibodies, humanized antibodies, and human antibodies. The term “antibody,” as used herein, also includes antibody fragments that retain binding specificity, including but not limited to Fab, F(ab′)₂, Fv, scFv, and bivalent scFv. Antibodies can contain light chains that are classified as either kappa or lambda. Antibodies can contain heavy chains that are classified as gamma, mu, alpha, delta, or epsilon, which in turn define the immunoglobulin classes, IgG, IgM, IgA, IgD and IgE, respectively.

[0142] An exemplary immunoglobulin (antibody) structural unit comprises a tetramer. Each tetramer is composed of two identical pairs of polypeptide chains, each pair having one “light” (about 25 kD) and one “heavy” chain (about 50-70 kD). The N-terminus of each chain defines a variable region of about 100 to 110 or more amino acids primarily responsible for antigen recognition. The terms “variable light chain” (VL) and “variable heavy chain” (VH) refer to these light and heavy chains, respectively.

[0143] The term “variable region” or “variable domain” refers to a domain in an antibody heavy chain or light chain that is derived from a germline Variable (V) gene, Diversity (D) gene, or Joining (J) gene (and not derived from a Constant (Cμ and Cδ) gene segment), and that gives an antibody its specificity for binding to an antigen. Typically, an antibody variable region comprises four conserved “framework” regions interspersed with three hypervariable “complementarity determining regions.”

[0144] The term “complementarity determining region” or “CDR” refers to the three hypervariable regions in each chain that interrupt the four framework regions established by the light and heavy chain variable regions. The CDRs are primarily responsible for antibody binding to an epitope of an antigen. The CDRs of each chain are typically referred to as CDR1, CDR2, and CDR3, numbered sequentially starting from the N-terminus, and are also typically identified by the chain in which the particular CDR is located. Thus, a VH CDR3 or CDR-H3 is located in the variable region of the heavy chain of the antibody in which it is found, whereas a VL CDR1 or CDR-L1 is the CDR1 from the variable region of the light chain of the antibody in which it is found.

[0145] The “framework regions” or “FRs” of different light or heavy chains are relatively conserved within a species. The framework region of an antibody, that is the combined framework regions of the constituent light and heavy chains, serves to position and align the CDRs in three-dimensional space. Framework sequences can be obtained from public DNA databases or published references that include germline antibody gene sequences. For example, germline DNA sequences for human heavy and light chain variable region genes can be found in the “VBASE2” germline variable gene sequence database for human and mouse sequences.

[0146] The amino acid sequences of the CDRs and framework regions can be determined using various well-known definitions in the art, e.g., Kabat, Chothia, international ImMunoGeneTics database (IMGT), AbM, and observed antigen contacts (“Contact”). In some embodiments, CDRs are determined according to the Contact definition. See, MacCallum et al., J. Mol. Biol., 262:732-745 (1996). In some embodiments, CDRs are determined by a combination of Kabat, Chothia, and/or Contact CDR definitions.

[0147] The terms “antigen-binding portion” and “antigen-binding fragment” are used interchangeably herein and refer to one or more fragments of an antibody that retains the ability to specifically bind to an antigen (e.g., a TREM2 protein) via its variable region. Examples of antigen-binding fragments include, but are not limited to, a Fab fragment (a monovalent fragment consisting of the VL, VH, CL and CH1 domains), F(ab′)₂ fragment (a bivalent fragment comprising two Fab fragments linked by a disulfide bridge at the hinge region), single chain Fv (scFv), disulfide-linked Fv (dsFv), complementarity determining regions (CDRs), a VL (light chain variable region), and a VH (heavy chain variable region).

[0148] The term “epitope” refers to the area or region of an antigen to which the CDRs of an antibody specifically binds and can include a few amino acids or portions of a few amino acids, e.g., 5 or 6, or more, e.g., 20 or more amino acids, or portions of those amino acids. For example, where the target is a protein, the epitope can be comprised of consecutive amino acids (e.g., a linear epitope), or amino acids from different parts of the protein that are brought into proximity by protein folding (e.g., a discontinuous or conformational epitope). In some embodiments, the epitope is phosphorylated at one amino acid (e.g., at a serine or threonine residue).

[0149] As used herein, the phrase “recognizes an epitope,” as used with reference to an anti-TREM2 antibody, means that the antibody CDRs interact with or specifically bind to the antigen (i.e., the TREM2 protein) at that epitope or a portion of the antigen containing that epitope.

[0150] As used herein, the term “multispecific antibody” refers to an antibody that comprises two or more different antigen-binding portions, in which each antigen-binding portion comprises a different variable region that recognizes a different antigen, or a fragment or portion of the antibody that binds to the two or more different antigens via its variable regions. As used herein, the term “bispecific antibody” refers to an antibody that comprises two different antigen-binding portions, in which each antigen-binding portion comprises a different variable region that recognizes a different antigen, or a fragment or portion of the antibody that binds to the two different antigens via its variable regions.

[0151] A “monoclonal antibody” refers to antibodies produced by a single clone of cells or a single cell line and consisting of or consisting essentially of antibody molecules that are identical in their primary amino acid sequence.

[0152] A “polyclonal antibody” refers to an antibody obtained from a heterogeneous population of antibodies in which different antibodies in the population bind to different epitopes of an antigen.

[0153] A “chimeric antibody” refers to an antibody molecule in which the constant region, or a portion thereof, is altered, replaced or exchanged so that the antigen-binding site (i.e., variable region, CDR, or portion thereof) is linked to a constant region of a different or altered class, effector function and/or species, or in which the variable region, or a portion thereof, is altered, replaced or exchanged with a variable region having a different or altered antigen specificity (e.g., CDR and framework regions from different species). In some embodiments, a chimeric antibody is a monoclonal antibody comprising a variable region from one source or species (e.g., mouse) and a constant region derived from a second source or species (e.g., human). Methods for producing chimeric antibodies are described in the art.

[0154] A “humanized antibody” is a chimeric antibody derived from a non-human source (e.g., murine) that contains minimal sequences derived from the non-human immunoglobulin outside the CDRs. In general, a humanized antibody will comprise at least one (e.g., two) antigen-binding variable domain(s), in which the CDR regions substantially correspond to those of the non-human immunoglobulin and the framework regions substantially correspond to those of a human immunoglobulin sequence. In some instances, certain framework region residues of a human immunoglobulin can be replaced with the corresponding residues from a non-human species to, e.g., improve specificity, affinity, and/or serum half-life. The humanized antibody can also comprise at least a portion of an immunoglobulin constant region (Fc), typically that of a human immunoglobulin sequence. Methods of antibody humanization are known in the art.

[0155] A “human antibody” or a “fully human antibody” is an antibody having human heavy chain and light chain sequences, typically derived from human germline genes. In some embodiments, the antibody is produced by a human cell, by a non-human animal that utilizes human antibody repertoires (e.g., transgenic mice that are genetically engineered to express human antibody sequences), or by phage display platforms.

[0156] The term “specifically binds” refers to a molecule (e.g., an antibody (or an antigen-binding portion thereof) or a modified Fc polypeptide (or a target-binding portion thereof)) that binds to an epitope or target with greater affinity, greater avidity, and/or greater duration to that epitope or target in a sample than it binds to another epitope or non-target compound (e.g., a structurally different antigen). In some embodiments, an antibody (or an antigen-binding portion thereof) or a modified Fc polypeptide (or a target-binding portion thereof) that specifically binds to an epitope or target is an antibody (or an antigen-binding portion thereof) or a modified Fc polypeptide (or a target-binding portion thereof) that binds to the epitope or target with at least 5-fold greater affinity than other epitopes or non-target compounds, e.g., at least 6-fold, 7-fold, 8-fold, 9-fold, 10-fold, 20-fold, 25-fold, 50-fold, 100-fold, 1,000-fold, 10,000-fold, or greater affinity. In some embodiments, an antibody that specifically binds to a TREM2 protein (e.g., human TREM2) binds to the TREM2 protein with at least a 5-fold greater affinity than to a non-TREM2 protein (e.g., at least 10-fold, 50-fold, 100-fold, 1,000-fold, 10,000-fold or greater affinity). The term “specific binding,” “specifically binds to,” or “is specific for” a particular epitope or target, as used herein, can be exhibited, for example, by a molecule having an equilibrium dissociation constant K_{D} for the epitope or target to which it binds of, e.g., 10⁻⁴ M or smaller, e.g., 10⁻⁵ M, 10⁻⁶ M, 10⁻⁷ M, 10⁻⁸ M, 10⁻⁹ M, 10⁻¹⁰ M, 10⁻¹¹ M, or 10⁻¹² M. It will be recognized by one of skill that an antibody that specifically binds to a TREM2 protein from one species may also specifically bind to orthologs of the TREM2 protein.

[0157] The term “binding affinity” is used herein to refer to the strength of a non-covalent interaction between two molecules, e.g., between an antibody (or an antigen-binding portion thereof) and an antigen, or between a modified Fc polypeptide (or a target-binding portion thereof) and a target. Thus, for example, the term may refer to 1:1 interactions between an antibody (or an antigen-binding portion thereof) and an antigen or between a modified Fc polypeptide (or a target-binding portion thereof) and a target, unless otherwise indicated or clear from context. Binding affinity may be quantified by measuring an equilibrium dissociation constant (K_{D}), which refers to the dissociation rate constant (k_{d}, time⁻¹) divided by the association rate constant (kₐ, time⁻¹ M⁻¹). K_{D} can be determined by measurement of the kinetics of complex formation and dissociation, e.g., using Surface Plasmon Resonance (SPR) methods, e.g., a Biacore™ system; kinetic exclusion assays such as KinExA®; and BioLayer interferometry (e.g., using the ForteBio® Octet platform). As used herein, “binding affinity” includes not only formal binding affinities, such as those reflecting 1:1 interactions between an antibody (or an antigen-binding portion thereof) and an antigen or between a modified Fc polypeptide (or a target-binding portion thereof) and a target, but also apparent affinities for which K_{DS} are calculated that may reflect avid binding.

[0158] A “transferrin receptor” or “TfR,” as used herein, refers to transferrin receptor protein 1. The human transferrin receptor 1 polypeptide sequence is set forth in SEQ ID NO:97. Transferrin receptor protein 1 sequences from other species are also known (e.g., chimpanzee, accession number XP_003310238.1; rhesus monkey, NP_001244232.1; dog, NP_001003111.1; cattle, NP_001193506.1; mouse, NP_035768.1; rat, NP_073203.1; and chicken, NP_990587.1). The term “transferrin receptor” also encompasses allelic variants of exemplary reference sequences, e.g., human sequences, that are encoded by a gene at a transferrin receptor protein 1 chromosomal locus. Full-length transferrin receptor protein includes a short N-terminal intracellular region, a transmembrane region, and a large extracellular domain. The extracellular domain is characterized by three domains: a protease-like domain, a helical domain, and an apical domain.

[0159] As used herein, the term “Fc polypeptide” refers to the C-terminal region of a naturally occurring immunoglobulin heavy chain polypeptide that is characterized by an Ig fold as a structural domain. An Fc polypeptide contains constant region sequences including at least the CH2 domain and/or the CH3 domain and may contain at least part of the hinge region, but does not contain a variable region.

[0160] A “modified Fc polypeptide” refers to an Fc polypeptide that has at least one mutation, e.g., a substitution, deletion or insertion, as compared to a wild-type immunoglobulin heavy chain Fc polypeptide sequence, but retains the overall Ig fold or structure of the native Fc polypeptide.

[0161] As used herein, the term “FcRn” refers to the neonatal Fc receptor. Binding of Fc polypeptides to FcRn reduces clearance and increases serum half-life of the Fc polypeptide. The human FcRn protein is a heterodimer that is composed of a protein of about 50 kDa in size that is similar to a major histocompatibility (MHC) class I protein and a β2-microglobulin of about 15 kDa in size.

[0162] As used herein, an “FcRn binding site” refers to the region of an Fc polypeptide that binds to FcRn. In human IgG, the FcRn binding site, as numbered using the EU index, includes L251, M252, I253, S254, R255, T256, M428, H433, N434, H435, and Y436. These positions correspond to positions 21 to 26, 198, and 203 to 206 of SEQ ID NO:98.

[0163] As used herein, a “native FcRn binding site” refers to a region of an Fc polypeptide that binds to FcRn and that has the same amino acid sequence as the region of a naturally occurring Fc polypeptide that binds to FcRn.

[0164] As used herein, the terms “CH3 domain” and “CH2 domain” refer to immunoglobulin constant region domain polypeptides. For purposes of this application, a CH3 domain polypeptide refers to the segment of amino acids from about position 341 to about position 447 as numbered according to the EU numbering scheme, and a CH2 domain polypeptide refers to the segment of amino acids from about position 231 to about position 340 as numbered according to the EU numbering scheme and does not include hinge region sequences. CH2 and CH3 domain polypeptides may also be numbered by the IMGT (ImMunoGeneTics) numbering scheme in which the CH2 domain numbering is 1-110 and the CH3 domain numbering is 1-107, according to the IMGT Scientific chart numbering (IMGT website). CH2 and CH3 domains are part of the Fc region of an immunoglobulin. An Fc region refers to the segment of amino acids from about position 231 to about position 447 as numbered according to the EU numbering scheme, but as used herein, can include at least a part of a hinge region of an antibody. An illustrative hinge region sequence is the human IgG1 hinge sequence EPKSCDKTHTCPPCP (SEQ ID NO:99).

[0165] The terms “wild-type,” “native,” and “naturally occurring,” as used with reference to a CH3 or CH2 domain, refer to a domain that has a sequence that occurs in nature.

[0166] As used herein, the term “mutant,” as used with reference to a mutant polypeptide or mutant polynucleotide is used interchangeably with “variant.” A variant with respect to a given wild-type CH3 or CH2 domain reference sequence can include naturally occurring allelic variants. A “non-naturally” occurring CH3 or CH2 domain refers to a variant or mutant domain that is not present in a cell in nature and that is produced by genetic modification, e.g., using genetic engineering technology or mutagenesis techniques, of a native CH3 domain or CH2 domain polynucleotide or polypeptide. A “variant” includes any domain comprising at least one amino acid mutation with respect to wild-type. Mutations may include substitutions, insertions, and deletions.

[0167] The term “cross-reacts,” as used herein, refers to the ability of an antibody to bind to an antigen other than the antigen against which the antibody was raised. In some embodiments, cross-reactivity refers to the ability of an antibody to bind to an antigen from another species than the antigen against which the antibody was raised. As a non-limiting example, an anti-TREM2 antibody as described herein that is raised against a human TREM2 peptide can exhibit cross-reactivity with a TREM2 peptide or protein from a different species (e.g., monkey or mouse).

[0168] The term “isolated,” as used with reference to a nucleic acid or protein (e.g., antibody), denotes that the nucleic acid or protein is essentially free of other cellular components with which it is associated in the natural state. Purity and homogeneity are typically determined using analytical chemistry techniques such as electrophoresis (e.g., polyacrylamide gel electrophoresis) or chromatography (e.g., high performance liquid chromatography). In some embodiments, an isolated nucleic acid or protein (e.g., antibody) is at least 85% pure, at least 90% pure, at least 95% pure, or at least 99% pure.

[0169] The term “amino acid” refers to naturally occurring and synthetic amino acids, as well as amino acid analogs and amino acid mimetics that function in a manner similar to the naturally occurring amino acids. Naturally occurring amino acids are those encoded by the genetic code, as well as those amino acids that are later modified, e.g., hydroxyproline, y-carboxyglutamate, and O-phosphoserine. “Amino acid analogs” refer to compounds that have the same basic chemical structure as a naturally occurring amino acid, i.e., an a carbon that is bound to a hydrogen, a carboxyl group, an amino group, and an R group, e.g., homoserine, norleucine, methionine sulfoxide, methionine methyl sulfonium. Such analogs have modified R groups (e.g., norleucine) or modified peptide backbones, but retain the same basic chemical structure as a naturally occurring amino acid. “Amino acid mimetics” refers to chemical compounds that have a structure that is different from the general chemical structure of an amino acid, but that functions in a manner similar to a naturally occurring amino acid. Amino acids may be referred to herein by either their commonly known three letter symbols or by the one-letter symbols recommended by the IUPAC-IUB Biochemical Nomenclature Commission.

[0170] The terms “polypeptide” and “peptide,” are used interchangeably herein to refer to a polymer of amino acid residues in a single chain. The terms apply to amino acid polymers in which one or more amino acid residue is an artificial chemical mimetic of a corresponding naturally occurring amino acid, as well as to naturally occurring amino acid polymers and non-naturally occurring amino acid polymers. Amino acid polymers may comprise entirely L-amino acids, entirely D-amino acids, or a mixture of L and D amino acids.

[0171] The term “protein” as used herein refers to either a polypeptide or a dimer (i.e, two) or multimer (i.e., three or more) of single chain polypeptides. The single chain polypeptides of a protein may be joined by a covalent bond, e.g., a disulfide bond, or non-covalent interactions.

[0172] The terms “polynucleotide” and “nucleic acid” interchangeably refer to chains of nucleotides of any length, and include DNA and RNA. The nucleotides can be deoxyribonucleotides, ribonucleotides, modified nucleotides or bases, and/or their analogs, or any substrate that can be incorporated into a chain by DNA or RNA polymerase. A polynucleotide may comprise modified nucleotides, such as methylated nucleotides and their analogs. Examples of polynucleotides contemplated herein include single- and double-stranded DNA, single- and double-stranded RNA, and hybrid molecules having mixtures of single- and double-stranded DNA and RNA.

[0173] The terms “conservative substitution” and “conservative mutation” refer to an alteration that results in the substitution of an amino acid with another amino acid that can be categorized as having a similar feature. Examples of categories of conservative amino acid groups defined in this manner can include: a “charged/polar group” including Glu (Glutamic acid or E), Asp (Aspartic acid or D), Asn (Asparagine or N), Gln (Glutamine or Q), Lys (Lysine or K), Arg (Arginine or R), and His (Histidine or H); an “aromatic group” including Phe (Phenylalanine or F), Tyr (Tyrosine or Y), Trp (Tryptophan or W), and (Histidine or H); and an “aliphatic group” including Gly (Glycine or G), Ala (Alanine or A), Val (Valine or V), Leu (Leucine or L), Ile (Isoleucine or I), Met (Methionine or M), Ser (Serine or S), Thr (Threonine or T), and Cys (Cysteine or C). Within each group, subgroups can also be identified. For example, the group of charged or polar amino acids can be sub-divided into sub-groups including: a “positively-charged sub-group” comprising Lys, Arg and His; a “negatively-charged sub-group” comprising Glu and Asp; and a “polar sub-group” comprising Asn and Gln. In another example, the aromatic or cyclic group can be sub-divided into sub-groups including: a “nitrogen ring sub-group” comprising Pro, His and Trp; and a “phenyl sub-group” comprising Phe and Tyr. In another further example, the aliphatic group can be sub-divided into sub-groups, e.g., an “aliphatic non-polar sub-group” comprising Val, Leu, Gly, and Ala; and an “aliphatic slightly-polar sub-group” comprising Met, Ser, Thr, and Cys. Examples of categories of conservative mutations include amino acid substitutions of amino acids within the sub-groups above, such as, but not limited to: Lys for Arg or vice versa, such that a positive charge can be maintained; Glu for Asp or vice versa, such that a negative charge can be maintained; Ser for Thr or vice versa, such that a free —OH can be maintained; and Gln for Asn or vice versa, such that a free —NH₂ can be maintained. In some embodiments, hydrophobic amino acids are substituted for naturally occurring hydrophobic amino acid, e.g., in the active site, to preserve hydrophobicity.

[0174] The terms “identical” or percent “identity,” in the context of two or more polypeptide sequences, refer to two or more sequences or subsequences that are the same or have a specified percentage of amino acid residues, e.g., at least 60% identity, at least 65%, at least 70%, at least 75%, at least 80%, at least 85%, at least 90%, or at least 95% or greater, that are identical over a specified region when compared and aligned for maximum correspondence over a comparison window, or designated region as measured using a sequence comparison algorithm or by manual alignment and visual inspection.

[0175] For sequence comparison of polypeptides, typically one amino acid sequence acts as a reference sequence, to which a candidate sequence is compared. Alignment can be performed using various methods available to one of skill in the art, e.g., visual alignment or using publicly available software using known algorithms to achieve maximal alignment. Such programs include the BLAST programs, ALIGN, ALIGN-2 (Genentech, South San Francisco, Calif.) or Megalign (DNASTAR). The parameters employed for an alignment to achieve maximal alignment can be determined by one of skill in the art. For sequence comparison of polypeptide sequences for purposes of this application, the BLASTP algorithm standard protein BLAST for aligning two proteins sequence with the default parameters is used.

[0176] The terms “corresponding to,” “determined with reference to,” or “numbered with reference to” when used in the context of the identification of a given amino acid residue in a polypeptide sequence, refers to the position of the residue of a specified reference sequence when the given amino acid sequence is maximally aligned and compared to the reference sequence. Thus, for example, an amino acid residue in a modified Fc polypeptide “corresponds to” an amino acid in SEQ ID NO:98, when the residue aligns with the amino acid in SEQ ID NO:98 when optimally aligned to SEQ ID NO:98. The polypeptide that is aligned to the reference sequence need not be the same length as the reference sequence.

[0177] The terms “subject,” “individual,” and “patient,” as used interchangeably herein, refer to a mammal, including but not limited to humans, non-human primates, rodents (e.g., rats, mice, and guinea pigs), rabbits, cows, pigs, horses, and other mammalian species. In one embodiment, the subject, individual, or patient is a human.

[0178] The terms “treating,” “treatment,” and the like are used herein to generally mean obtaining a desired pharmacologic and/or physiologic effect. “Treating” or “treatment” may refer to any indicia of success in the treatment or amelioration of a neurodegenerative disease (e.g., Alzheimer's disease or another neurodegenerative disease described herein), including any objective or subjective parameter such as abatement, remission, improvement in patient survival, increase in survival time or rate, diminishing of symptoms or making the disease more tolerable to the patient, slowing in the rate of degeneration or decline, or improving a patient's physical or mental well-being. The treatment or amelioration of symptoms can be based on objective or subjective parameters. The effect of treatment can be compared to an individual or pool of individuals not receiving the treatment, or to the same patient prior to treatment or at a different time during treatment.

[0179] The term “pharmaceutically acceptable excipient” refers to a non-active pharmaceutical ingredient that is biologically or pharmacologically compatible for use in humans or animals, such as, but not limited to a buffer, carrier, or preservative.

[0180] As used herein, a “therapeutic amount” or “therapeutically effective amount” of an agent (e.g., an antibody as described herein) is an amount of the agent that treats, alleviates, abates, or reduces the severity of symptoms of a disease in a subject. A “therapeutic amount” of an agent (e.g., an antibody as described herein) may improve patient survival, increase survival time or rate, diminish symptoms, make an injury, disease, or condition (e.g., a neurodegenerative disease) more tolerable, slow the rate of degeneration or decline, or improve a patient's physical or mental well-being.

[0181] The term “administer” refers to a method of delivering agents, compounds, or compositions to the desired site of biological action. These methods include, but are not limited to, topical delivery, parenteral delivery, intravenous delivery, intradermal delivery, intramuscular delivery, intrathecal delivery, colonic delivery, rectal delivery, or intraperitoneal delivery. In one embodiment, an antibody as described herein is administered intravenously.

[0182] The term “selectively enhances,” as used in the context of a TREM2 antibody enhancing activity that is induced by a TREM2 ligand, means that the antibody enhances the activity of the TREM2 ligand to a greater extent (e.g., at least 1.5-fold, 2-fold, 2.5-fold, 3-fold, 4-fold, 5-fold, 8-fold, 10-fold, 15-fold, 20-fold, 30-fold, or 50-fold) as compared to an appropriate reference, for example, its enhancement of a reference TREM2 ligand (e.g., any described herein) or as compared to the average enhance of a group of TREM2 ligands (e.g., any or all described herein.

[0183] The term “control” or “control value” refers to a reference value or baseline value. Appropriate controls can be determined by one skilled in the art. In some instances, control values can be determined relative to a baseline within the same subject or experiment, e.g., a measurement of sTREM2 taken prior to treatment with an anti-TREM2 antibody can be a control value for a post-treatment measurement of sTREM2 levels in the same subject. In other instances, the control value can be determined relative to a control subject (e.g., a healthy control or a disease control) or an average value in a population of control subjects (e.g., healthy controls or disease controls, e.g., a population of 10, 20, 50, 100, 200, 500, 1000 control subjects or more), e.g, a measurement of a subject's level of sTREM2 either at baseline or after treatment can be compared to a healthy control value.

### III. Anti-Trem2 Antibodies

[0184] In one aspect, antibodies and antigen-binding portions thereof that specifically bind to a TREM2 protein are provided. In some embodiments, the antibody specifically binds to a human TREM2 protein. In some embodiments, an anti-TREM2 antibody is selective for TREM2 over other TREM-like receptors (e.g., TREM1).

[0185] In some embodiments, an antibody that specifically binds to TREM2 is an antibody having one or more TREM2 activities as described herein, e.g., is an antibody that modulates recruitment or phosphorylation of a kinase that interacts with a TREM2/DAP12 signaling complex (e.g., Syk kinase), modulates phagocytosis, modulates cell migration, and/or modulates cell differentiation; modulates levels of sTREM2; modulates ligand activation of TREM2; recognizes an epitope that is the same or substantially the same as the epitope recognized by antibody clone as described herein (e.g., 2G4.B1, 3D3.A1, 7B10.A2, 8A11.B1, 13B11.A1, 14D5.F1, 14H11.A1, 19F10.F3, 21D4.D1, 21D6.G2, 21D11, 22B8.B1, 22G9.D1, 24B4.A1, 26D2.D1, 26D5.A1, 26D11.B1, 26E2.A3, 30A8.A1, 30F2.A2, 38E9.E5, 39H10.A1, 40H3.A4, 42E8.H1, 43E9.H1, 44E2.H1, 44E3.B1, 49H11.B1, 51D4, 52H9.D1, 53H11.D3, 54C2.A1, 55B9.A1, 57D7.A1, 59C6.F1, 60A4.B1, RS9.E2, RS9.F6, RS9.F10, RS11.1F5, RS11.1G6, RS11.1A10, RS11.1D11, RS11.4A5, RS11.4H6, RS11.4D7, RS11.4D9, RS11.4F11, RS12.1C6, RS12.1C10, RS12.2D1, RS12.2D4, RS12.2E1, RS12.2F2, RS12.2G1, RS12.2H1, or RS12.3C10); and/or has one or more CDR, heavy chain variable region, and/or light chain variable region sequences as an antibody clone described herein (e.g., 2G4.B1, 3D3.A1, 7B10.A2, 8A11.B1, 13B11.A1, 14D5.F1, 14H11.A1, 19F10.F3, 21D4.D1, 21D6.G2, 21D11, 22B8.B1, 22G9.D1, 24B4.A1, 26D2.D1, 26D5.A1, 26D11.B1, 26E2.A3, 30A8.A1, 30F2.A2, 38E9.E5, 39H10.A1, 40H3.A4, 42E8.H1, 43E9.H1, 44E2.H1, 44E3.B1, 49H11.B1, 51D4, 52H9.D1, 53H11.D3, 54C2.A1, 55B9.A1, 57D7.A1, 59C6.F1, 60A4.B1, RS9.E2, RS9.F6, RS9.F10, RS11.1F5, RS11.1G6, RS11.1A10, RS11.1D11, RS11.4A5, RS11.4H6, RS11.4D7, RS11.4D9, RS11.4F11, RS12.1C6, RS12.1C10, RS12.2D1, RS12.2D4, RS12.2E1, RS12.2F2, RS12.2G1, RS12.2H1, or RS12.3C10).

Anti-TREM2 Antibodies that Modulate sTREM2 Shedding

[0186] In some embodiments, an anti-TREM2 antibody alters levels of sTREM2 protein in a sample, e.g., levels of sTREM2 that are shed from the cell surface into an extracellular sample. In some embodiments, an anti-TREM2 antibody decreases levels of sTREM2. In some embodiments, an anti-TREM2 antibody increases levels of sTREM2.

[0187] In some embodiments, an anti-TREM2 antibody decreases levels of sTREM2 if the amount of sTREM2 in a treated sample is decreased by at least 10%, at least 20%, at least 30%, at least 40%, at least 50%, at least 60%, at least 70%, at least 80%, at least 90% or more as compared to a control value. In some embodiments, an anti-TREM2 antibody decreases levels of sTREM2 if the amount of sTREM2 in a treated sample is decreased by at least 2-fold, 3-fold, 4-fold, 5-fold, 6-fold, 7-fold, 8-fold, 9-fold, 10-fold or more as compared to a control value. In some embodiments, the control value is the amount of sTREM2 in an untreated sample (e.g., a supernatant from a TREM2-expressing cell that has not been treated with an anti-TREM2 antibody, or a sample from a subject that has not been treated with an anti-TREM2 antibody) or a sample treated with an appropriate non-TREM2-binding antibody.

[0188] In some embodiments, an anti-TREM2 antibody increases levels of sTREM2 if the amount of sTREM2 in a treated sample is increased by at least 10%, at least 20%, at least 30%, at least 40%, at least 50%, at least 60%, at least 70%, at least 80%, at least 90% or more as compared to a control value. In some embodiments, an anti-TREM2 antibody increases levels of sTREM2 if the amount of sTREM2 in a treated sample is increased by at least 2-fold, 3-fold, 4-fold, 5-fold, 6-fold, 7-fold, 8-fold, 9-fold, 10-fold or more as compared to a control value. In some embodiments, the control value is the amount of sTREM2 in an untreated sample (e.g., a supernatant from a TREM2-expressing cell that has not been treated with an anti-TREM2 antibody, or a sample from a subject that has not been treated with an anti-TREM2 antibody) or a sample treated with an appropriate non-TREM2-binding antibody.

[0189] In some embodiments, sTREM2 shedding is measured using a sample that comprises a fluid, e.g., blood, plasma, serum, urine, or cerebrospinal fluid. In some embodiments, the sample comprises cerebrospinal fluid. In some embodiments, the sample comprises supernatant from cell cultures (e.g., supernatant from a primary cell or cell line that endogenously expresses TREM2, such as human macrophages, or a primary cell or cell line that has been engineered to express TREM2, e.g., as described in the Examples section below).

[0190] In some embodiments, the level of sTREM2 in a sample is measured using an immunoassay. Immunoassays are known in the art and include, but are not limited to, enzyme immunoassays (EIA) such as enzyme multiplied immunoassay (EMIA), enzyme-linked immunosorbent assay (ELISA), microparticle enzyme immunoassay (MEIA), immunohistochemistry (IHC), immunocytochemistry, capillary electrophoresis immunoassays (CEIA), radioimmunoassays (RIA), immunofluorescence, chemiluminescence immunoassays (CL), and electrochemiluminescence immunoassays (ECL). In some embodiments, sTREM2 levels are measuring using an ELISA assay. In some embodiments, sTREM2 levels are measured using an ELISA assay as described in the Examples section below.

[0191] In some embodiments, an anti-TREM2 antibody that decreases levels of sTREM2 also modulates one or more TREM2 activities as described below. In some embodiments, an anti-TREM2 antibody that increases levels of sTREM2 also modulates one or more TREM2 activities as described below.

Anti-TREM2 Antibodies that Modulate TREM2 Activities

[0192] In some embodiments, an anti-TREM2 antibody modulates one or more TREM2 activities. For example, in some embodiments, an anti-TREM2 antibody modulates the recruitment or phosphorylation of a kinase that interacts with the TREM2/DAP12 signaling complex. In some embodiments, the anti-TREM2 antibody modulates one or more downstream activities such as phagocytosis, cell growth, cell survival, cell differentiation, cytokine secretion, or cell migration.

[0193] In some embodiments, an anti-TREM2 antibody enhances one or more TREM2 activities, including but not limited to inducing phosphorylation of a kinase that interacts with the TREM2/DAP12 signaling complex, enhancing phagocytosis (e.g., phagocytosis of cell debris, amyloid beta particles, etc.), enhancing cell migration (e.g., migration of microglia or macrophages), enhancing cell function (e.g., for myeloid cells, microglia, including disease associated microglia, and macrophages), and/or enhancing cell survival or cell differentiation (e.g., for myeloid cells, microglia, including disease associated microglia, and macrophages).

[0194] In some embodiments, an anti-TREM2 antibody enhances one or more TREM2 activities (e.g., those described above) that are induced by a ligand. An anti-TREM2 antibody that enhances one or more TREM2 activities that is induced by a ligand is referred to herein as a “positive allosteric modulator” (“PAM”). In some embodiments, an anti-TREM2 antibody enhances one or more TREM2 activities without blocking binding of a native TREM2 ligand. In some embodiments, an anti-TREM2 antibody blocks binding of a TREM2 ligand to TREM2. In some embodiments, an anti-TREM2 antibody enhances one or more TREM2 activities that is induced by a ligand but does not enhance TREM2 activity in the absence of a ligand. In some embodiments, an anti-TREM2 antibody selectively enhances activity of a TREM2 ligand. In some embodiments, an anti-TREM2 antibody prevents activation of TREM2 by a TREM2 ligand.

[0195] In some embodiments, an anti-TREM2 antibody inhibits one or more TREM2 activities, including but not limited to decreasing or inhibiting phosphorylation of a kinase that interacts with the TREM2/DAP12 signaling complex, reducing or inhibiting phagocytosis (e.g., phagocytosis of cell debris, amyloid beta particles, etc.), decreasing or inhibiting cell migration (e.g., migration of microglia or macrophages), and/or decreasing or inhibiting cell survival or cell differentiation (e.g., for myeloid cells, microglia, including disease associated microglia, and macrophages). In some embodiments, an anti-TREM2 antibody inhibits one or more TREM2 activities that are induced by a ligand. An anti-TREM2 antibody that inhibits one or more TREM2 activities that is induced by a ligand is referred to herein as a “negative allosteric modulator” (“NAM”). In some embodiments, an anti-TREM2 antibody inhibits one or more TREM2 activities that is induced by a ligand but does not inhibit TREM2 activity in the absence of a ligand. In some embodiments, an anti-TREM2 antibody inhibits TREM2 activity in the absence of a TREM2 ligand and inhibits one or more TREM2 activities that is induced by a ligand. In some embodiments, an anti-TREM2 antibody prevents activation of TREM2 by a TREM2 ligand. In some embodiments, an anti-TREM2 antibody binds TREM2 at the ligand-binding site. In some embodiments, an anti-TREM2 antibody blocks binding of a TREM2 ligand to TREM2.

[0196] Kinase Phosphorylation

[0197] In some embodiments, an anti-TREM2 antibody induces phosphorylation of a kinase that interacts with the TREM2/DAP12 signaling complex (such as, but not limited to, Syk, ZAP70, PI3K, Erk, AKT, or GSK3b). In some embodiments, an anti-TREM2 antibody induces phosphorylation of a kinase that interacts with the TREM2/DAP12 signaling complex without blocking binding of a native TREM2 ligand. In some embodiments, an anti-TREM2 antibody induces phosphorylation of Syk. In some embodiments, an anti-TREM2 antibody induces phosphorylation of Syk if the level of Syk phosphorylation in a sample treated with the anti-TREM2 antibody is increased by at least 10%, at least 20%, at least 30%, at least 40%, at least 50%, at least 60%, at least 70%, at least 80%, at least 90% or more as compared to a control value. In some embodiments, an anti-TREM2 antibody induces phosphorylation of Syk if the level of Syk phosphorylation in a sample treated with the anti-TREM2 antibody is increased by at least 2-fold, 3-fold, 4-fold, 5-fold, 6-fold, 7-fold, 8-fold, 9-fold, 10-fold, or more as compared to a control value. In some embodiments, the control value is the level of Syk phosphorylation in an untreated sample (e.g., a sample comprising a TREM2-expressing cell that has not been treated with an anti-TREM2 antibody, or a sample from a subject that has not been treated with an anti-TREM2 antibody) or a sample treated with an appropriate non-TREM2-binding antibody.

[0198] In some embodiments, an anti-TREM2 antibody induces phosphorylation of a kinase that interacts with the TREM2/DAP12 signaling complex (such as, but not limited to, Syk, ZAP70, PI3K, Erk, AKT, or GSK3b) in the presence of a ligand. In some embodiments, an anti-TREM2 antibody induces phosphorylation of Syk in the presence of a ligand. In some embodiments, an anti-TREM2 antibody induces phosphorylation of Syk in the presence of a ligand if the level of Syk phosphorylation in a sample treated with a TREM2 ligand and the anti-TREM2 antibody is increased by at least 10%, at least 20%, at least 30%, at least 40%, at least 50%, at least 60%, at least 70%, at least 80%, at least 90% or more as compared to a control value. In some embodiments, an anti-TREM2 antibody induces phosphorylation of Syk in the presence of a ligand if the level of Syk phosphorylation in a sample treated with a TREM2 ligand and the anti-TREM2 antibody is increased by at least 2-fold, 3-fold, 4-fold, 5-fold, 6-fold, 7-fold, 8-fold, 9-fold, 10-fold, 15-fold, 20-fold, or more as compared to a control value (e.g., the level in the presence of the ligand but in the absence of the antibody). In some embodiments, the control value is the level of Syk phosphorylation in an untreated sample (e.g., a sample comprising a TREM2-expressing cell that has not been treated with a TREM2 ligand or an anti-TREM2 antibody, or a sample from a subject that has not been treated with a TREM2 ligand or an anti-TREM2 antibody) or a sample treated with an appropriate non-TREM2-binding antibody.

[0199] In some embodiments, an anti-TREM2 antibody induces phosphorylation of a kinase that interacts with the TREM2/DAP12 signaling complex (such as, but not limited to, Syk, ZAP70, PI3K, Erk, AKT, or GSK3b) in the presence of a ligand but not in the absence of a ligand. In some embodiments, an anti-TREM2 antibody induces phosphorylation of Syk in the presence but not the absence of a ligand. In some embodiments, an anti-TREM2 antibody induces phosphorylation of Syk in the presence but not the absence of a ligand if the level of Syk phosphorylation in a sample treated with a TREM2 ligand and the anti-TREM2 antibody is increased by at least 10%, at least 20%, at least 30%, at least 40%, at least 50%, at least 60%, at least 70%, at least 80%, at least 90% or more as compared to a control value, and if the level of Syk phosphorylation in a sample treated with the anti-TREM2 antibody but not the TREM2 ligand is not substantially increased as compared to a control value (e.g., is not increased more than 10% or more than 5% as compared to the control value). In some embodiments, an anti-TREM2 antibody induces phosphorylation of Syk in the presence but not the absence of a ligand if the level of Syk phosphorylation in a sample treated with a TREM2 ligand and the anti-TREM2 antibody is increased by at least 2-fold, 3-fold, 4-fold, 5-fold, 6-fold, 7-fold, 8-fold, 9-fold, 10-fold, 15-fold, 20-fold, 30-fold, or more as compared to a control value, and if the level of Syk phosphorylation in a sample treated with the anti-TREM2 antibody but not the TREM2 ligand is not substantially increased as compared to a control value (e.g., is not increased more than 1.5-fold or more than 1-fold as compared to the control value). In some embodiments, the control value is the level of Syk phosphorylation in an untreated sample (e.g., a sample comprising a TREM2-expressing cell that has not been treated with a TREM2 ligand or an anti-TREM2 antibody, or a sample from a subject that has not been treated with a TREM2 ligand or an anti-TREM2 antibody) or a sample treated with an appropriate non-TREM2-binding antibody.

[0200] In some embodiments, an anti-TREM2 antibody inhibits phosphorylation of a kinase that interacts with the TREM2/DAP12 signaling complex (such as, but not limited to, Syk, ZAP70, PI3K, Erk, AKT, or GSK3b). In some embodiments, an anti-TREM2 antibody inhibits phosphorylation of Syk. In some embodiments, an anti-TREM2 antibody inhibits phosphorylation of Syk if the level of Syk phosphorylation in a sample treated with the anti-TREM2 antibody is decreased by at least 10%, at least 20%, at least 30%, at least 40%, at least 50%, at least 60%, at least 70%, at least 80%, at least 90% or more as compared to a control value. In some embodiments, an anti-TREM2 antibody inhibits phosphorylation of Syk if the level of Syk phosphorylation in a sample treated with the anti-TREM2 antibody is decreased by at least 2-fold, 3-fold, 4-fold, 5-fold, 6-fold, 7-fold, 8-fold, 9-fold, 10-fold, or more as compared to a control value. In some embodiments, the control value is the level of Syk phosphorylation in an untreated sample (e.g., a sample comprising a TREM2-expressing cell that has not been treated with an anti-TREM2 antibody, or a sample from a subject that has not been treated with an anti-TREM2 antibody) or a sample treated with an appropriate non-TREM2-binding antibody.

[0201] In some embodiments, an anti-TREM2 antibody inhibits phosphorylation of a kinase that interacts with the TREM2/DAP12 signaling complex (such as, but not limited to, Syk, ZAP70, PI3K, Erk, AKT, or GSK3b) in the presence of a ligand. In some embodiments, an anti-TREM2 antibody inhibits phosphorylation of Syk in the presence of a ligand. In some embodiments, an anti-TREM2 antibody inhibits phosphorylation of Syk in the presence of a ligand if the level of Syk phosphorylation in a sample treated with a TREM2 ligand and the anti-TREM2 antibody is decreased by at least 10%, at least 20%, at least 30%, at least 40%, at least 50%, at least 60%, at least 70%, at least 80%, at least 90% or more as compared to a control value. In some embodiments, an anti-TREM2 antibody inhibits phosphorylation of Syk in the presence of a ligand if the level of Syk phosphorylation in a sample treated with a TREM2 ligand and the anti-TREM2 antibody is decreased by at least 2-fold, 3-fold, 4-fold, 5-fold, 6-fold, 7-fold, 8-fold, 9-fold, 10-fold, or more as compared to a control value. In some embodiments, the control value is the level of Syk phosphorylation in an untreated sample (e.g., a sample comprising a TREM2-expressing cell that has not been treated with a TREM2 ligand or an anti-TREM2 antibody, or a sample from a subject that has not been treated with a TREM2 ligand or an anti-TREM2 antibody) or a sample treated with an appropriate non-TREM2-binding antibody.

[0202] In some embodiments, an anti-TREM2 antibody inhibits phosphorylation of a kinase that interacts with the TREM2/DAP12 signaling complex (such as, but not limited to, Syk, ZAP70, PI3K, Erk, AKT, or GSK3b) in the presence of a ligand but not in the absence of a ligand. In some embodiments, an anti-TREM2 antibody inhibits phosphorylation of Syk in the presence but not the absence of a ligand. In some embodiments, an anti-TREM2 antibody inhibits phosphorylation of Syk in the presence but not the absence of a ligand if the level of Syk phosphorylation in a sample treated with a TREM2 ligand and the anti-TREM2 antibody is decreased by at least 10%, at least 20%, at least 30%, at least 40%, at least 50%, at least 60%, at least 70%, at least 80%, at least 90% or more as compared to a control value, and if the level of Syk phosphorylation in a sample treated with the anti-TREM2 antibody but not the TREM2 ligand is not substantially decreased as compared to a control value (e.g., is not decreased more than 10% or more than 5% as compared to the control value). In some embodiments, an anti-TREM2 antibody inhibits phosphorylation of Syk in the presence but not the absence of a ligand if the level of Syk phosphorylation in a sample treated with a TREM2 ligand and the anti-TREM2 antibody is decreased by at least 2-fold, 3-fold, 4-fold, 5-fold, 6-fold, 7-fold, 8-fold, 9-fold, 10-fold, or more as compared to a control value, and if the level of Syk phosphorylation in a sample treated with the anti-TREM2 antibody but not the TREM2 ligand is not substantially decreased as compared to a control value (e.g., is not decreased more than 1.5-fold or more than 1-fold as compared to the control value). In some embodiments, the control value is the level of Syk phosphorylation in an untreated sample (e.g., a sample comprising a TREM2-expressing cell that has not been treated with a TREM2 ligand or an anti-TREM2 antibody, or a sample from a subject that has not been treated with a TREM2 ligand or an anti-TREM2 antibody) or a sample treated with an appropriate non-TREM2-binding antibody.

[0203] In some embodiments, an anti-TREM2 antibody inhibits phosphorylation of a kinase that interacts with the TREM2/DAP12 signaling complex (such as, but not limited to, Syk, ZAP70, PI3K, Erk, AKT, or GSK3b) in the absence of a ligand and inhibits phosphorylation of a kinase that interacts with the TREM2/DAP12 signaling complex that is induced by a ligand. In some embodiments, an anti-TREM2 antibody inhibits phosphorylation of Syk in the absence of a ligand and inhibits phosphorylation of Syk that is induced by a ligand. In some embodiments, an anti-TREM2 antibody inhibits phosphorylation of Syk in the absence of a ligand and inhibits phosphorylation of Syk that is induced by a ligand if the level of Syk phosphorylation in a sample treated with the anti-TREM2 antibody in the absence of a TREM2 ligand is decreased by at least 10%, at least 20%, at least 30%, at least 40%, at least 50%, at least 60%, at least 70%, at least 80%, at least 90% or more as compared to a control value, and if the level of Syk phosphorylation in a sample treated with the anti-TREM2 antibody and a TREM2 ligand is decreased by at least 10%, at least 20%, at least 30%, at least 40%, at least 50%, at least 60%, at least 70%, at least 80%, at least 90% or more as compared to a control value. In some embodiments, an anti-TREM2 antibody inhibits phosphorylation of Syk in the absence of a ligand and inhibits phosphorylation of Syk that is induced by a ligand if the level of Syk phosphorylation in a sample treated with the anti-TREM2 antibody in the absence of a TREM2 ligand is decreased by at least 2-fold, 3-fold, 4-fold, 5-fold, 6-fold, 7-fold, 8-fold, 9-fold, 10-fold, or more as compared to a control value, and if the level of Syk phosphorylation in a sample treated with the anti-TREM2 antibody and a TREM2 ligand is decreased by at least 2-fold, 3-fold, 4-fold, 5-fold, 6-fold, 7-fold, 8-fold, 9-fold, 10-fold, or more as compared to a control value. In some embodiments, the control value is the level of Syk phosphorylation in an untreated sample (e.g., a sample comprising a TREM2-expressing cell that has not been treated with a TREM2 ligand or an anti-TREM2 antibody, or a sample from a subject that has not been treated with a TREM2 ligand or an anti-TREM2 antibody) or a sample treated with an appropriate non-TREM2-binding antibody.

[0204] For detecting and/or quantifying phosphorylation (e.g., Syk phosphorylation) in a sample, in some embodiments, an immunoassay is used. In some embodiments, the immunoassay is an enzyme immunoassay (EIA), enzyme multiplied immunoassay (EMIA), enzyme-linked immunosorbent assay (ELISA), microparticle enzyme immunoassay (MEIA), immunohistochemistry (IHC), immunocytochemistry, capillary electrophoresis immunoassay (CEIA), radioimmunoassay (RIA), immunofluorescence, chemiluminescence immunoassay (CL), or electrochemiluminescence immunoassay (ECL). In some embodiments, phosphorylation is detected and/or quantified using an immunoassay that utilizes an amplified luminescent proximity homogenous assay (AlphaLISA®, PerkinElmer Inc.).

[0205] In some embodiments, phosphorylation is measured using a sample that comprises one or more cells, e.g., one or more TREM2-expressing cells (e.g., a primary cell or cell line that endogenously expresses TREM2, such as human macrophages, or a primary cell or cell line that has been engineered to express TREM2, e.g., as described in the Examples section below). In some embodiments, the sample comprises a fluid, e.g., blood, plasma, serum, urine, or cerebrospinal fluid. In some embodiments, the sample comprises tissue (e.g., lung, brain, kidney, spleen, nervous tissue, or skeletal muscle) or cells from such tissue. In some embodiments, the sample comprises endogenous fluid, tissue, or cells (e.g., from a human or non-human subject).

[0206] Phagocytosis

[0207] In some embodiments, an anti-TREM2 antibody enhances phagocytosis of dead cell debris, tissue debris, amyloid beta particles, or foreign material. In some embodiments, an anti-TREM2 antibody enhances phagocytosis without blocking binding of a native TREM2 ligand. In some embodiments, an anti-TREM2 antibody enhances phagocytosis if the level of phagocytosis in a sample treated with the anti-TREM2 antibody is increased by at least 10%, at least 20%, at least 30%, at least 40%, at least 50%, at least 60%, at least 70%, at least 80%, at least 90% or more as compared to a control value. In some embodiments, an anti-TREM2 antibody enhances phagocytosis if the level of phagocytosis in a sample treated with the anti-TREM2 antibody is increased by at least 2-fold, 3-fold, 4-fold, 5-fold, 6-fold, 7-fold, 8-fold, 9-fold, 10-fold, or more as compared to a control value. In some embodiments, the control value is the level of phagocytosis in an untreated sample or a sample treated with an appropriate non-TREM2-binding antibody.

[0208] In some embodiments, an anti-TREM2 antibody enhances phagocytosis in the presence of a ligand. In some embodiments, an anti-TREM2 antibody enhances phagocytosis in the presence of a ligand if the level of phagocytosis in a sample treated with a TREM2 ligand and the anti-TREM2 antibody is increased by at least 10%, at least 20%, at least 30%, at least 40%, at least 50%, at least 60%, at least 70%, at least 80%, at least 90% or more as compared to a control value. In some embodiments, an anti-TREM2 antibody enhances phagocytosis in the presence of a ligand if the level of phagocytosis in a sample treated with a TREM2 ligand and the anti-TREM2 antibody is increased by at least 2-fold, 3-fold, 4-fold, 5-fold, 6-fold, 7-fold, 8-fold, 9-fold, 10-fold, or more as compared to a control value. In some embodiments, the control value is the level of phagocytosis in an untreated sample or a sample treated with an appropriate non-TREM2-binding antibody.

[0209] In some embodiments, an anti-TREM2 antibody enhances phagocytosis in the presence of a ligand but not in the absence of a ligand. In some embodiments, an anti-TREM2 antibody enhances phagocytosis in the presence but not the absence of a ligand if the level of phagocytosis in a sample treated with a TREM2 ligand and the anti-TREM2 antibody is increased by at least 10%, at least 20%, at least 30%, at least 40%, at least 50%, at least 60%, at least 70%, at least 80%, at least 90% or more as compared to a control value, and if the level of phagocytosis in a sample treated with the anti-TREM2 antibody but not the TREM2 ligand is not substantially increased as compared to a control value (e.g., is not increased more than 10% or more than 5% as compared to the control value). In some embodiments, an anti-TREM2 antibody enhances phagocytosis in the presence but not the absence of a ligand if the level of phagocytosis in a sample treated with a TREM2 ligand and the anti-TREM2 antibody is increased by at least 2-fold, 3-fold, 4-fold, 5-fold, 6-fold, 7-fold, 8-fold, 9-fold, 10-fold, or more as compared to a control value, and if the level of phagocytosis in a sample treated with the anti-TREM2 antibody but not the TREM2 ligand is not substantially increased as compared to a control value (e.g., is not increased more than 1.5-fold or more than 1-fold as compared to the control value). In some embodiments, the control value is the level of phagocytosis in an untreated sample or a sample treated with an appropriate non-TREM2-binding antibody.

[0210] In some embodiments, an anti-TREM2 antibody reduces phagocytosis. In some embodiments, an anti-TREM2 antibody reduces phagocytosis if the level of phagocytosis in a sample treated with the anti-TREM2 antibody is decreased by at least 10%, at least 20%, at least 30%, at least 40%, at least 50%, at least 60%, at least 70%, at least 80%, at least 90% or more as compared to a control value. In some embodiments, an anti-TREM2 antibody reduces phagocytosis if the level of phagocytosis in a sample treated with the anti-TREM2 antibody is decreased by at least 2-fold, 3-fold, 4-fold, 5-fold, 6-fold, 7-fold, 8-fold, 9-fold, 10-fold, or more as compared to a control value. In some embodiments, the control value is the level of phagocytosis in an untreated sample or a sample treated with an appropriate non-TREM2-binding antibody.

[0211] In some embodiments, an anti-TREM2 antibody reduces phagocytosis in the presence of a ligand. In some embodiments, an anti-TREM2 antibody reduces phagocytosis in the presence of a ligand if the level of phagocytosis in a sample treated with a TREM2 ligand and the anti-TREM2 antibody is decreased by at least 10%, at least 20%, at least 30%, at least 40%, at least 50%, at least 60%, at least 70%, at least 80%, at least 90% or more as compared to a control value. In some embodiments, an anti-TREM2 antibody reduces phagocytosis in the presence of a ligand if the level of phagocytosis in a sample treated with a TREM2 ligand and the anti-TREM2 antibody is decreased by at least 2-fold, 3-fold, 4-fold, 5-fold, 6-fold, 7-fold, 8-fold, 9-fold, 10-fold, or more as compared to a control value. In some embodiments, the control value is the level of phagocytosis in an untreated sample or a sample treated with an appropriate non-TREM2-binding antibody.

[0212] In some embodiments, an anti-TREM2 antibody reduces phagocytosis in the presence of a ligand but not in the absence of a ligand. In some embodiments, an anti-TREM2 antibody reduces phagocytosis in the presence but not the absence of a ligand if the level of phagocytosis in a sample treated with a TREM2 ligand and the anti-TREM2 antibody is decreased by at least 10%, at least 20%, at least 30%, at least 40%, at least 50%, at least 60%, at least 70%, at least 80%, at least 90% or more as compared to a control value, and if the level of phagocytosis in a sample treated with the anti-TREM2 antibody but not the TREM2 ligand is not substantially decreased as compared to a control value (e.g., is not decreased more than 10% or more than 5% as compared to the control value). In some embodiments, an anti-TREM2 antibody reduces phagocytosis in the presence but not the absence of a ligand if the level of phagocytosis in a sample treated with a TREM2 ligand and the anti-TREM2 antibody is decreased by at least 2-fold, 3-fold, 4-fold, 5-fold, 6-fold, 7-fold, 8-fold, 9-fold, 10-fold, or more as compared to a control value, and if the level of phagocytosis in a sample treated with the anti-TREM2 antibody but not the TREM2 ligand is not substantially decreased as compared to a control value (e.g., is not decreased more than 1.5-fold or more than 1-fold as compared to the control value). In some embodiments, the control value is the level of phagocytosis in an untreated sample or a sample treated with an appropriate non-TREM2-binding antibody.

[0213] In some embodiments, phagocytosis is measured using a phagocytosis assay with a labeled substrate. Phagocytosis assays are known in the art. In some embodiments, the phagocytosis assay is performed on a sample comprising cells that endogenously express TREM2, such as human macrophages or microglia. In some embodiments, the phagocytosis assay is performed on a sample comprising cells that have been engineered to express TREM2. In some embodiments, cell migration is measured using a human macrophage phagocytosis assay as described in the Examples section below.

[0214] Cell Migration, Survival, Function, and Differentiation

[0215] In some embodiments, an anti-TREM2 antibody enhances cell migration, cell survival, or cell differentiation (e.g., for myeloid cells, macrophages, and microglia, including disease-associated microglia). Disease-associated microglia and methods of detecting disease-associated microglia are described in Keren-Shaul et al., Cell, 2017, 169:1276-1290. In some embodiments, an anti-TREM2 antibody enhances cell migration of one or more cell types (e.g., myeloid cells, macrophages, or microglia). In some embodiments, an anti-TREM2 antibody enhances cell survival of one or more cell types (e.g., myeloid cells, macrophages, or microglia). In some embodiments, an anti-TREM2 antibody enhances cell differentiation of one or more cell types (e.g., myeloid cells, macrophages, or microglia). In some embodiments, an anti-TREM2 antibody enhances the migration, survival, and/or differentiation of myeloid cells. In some embodiments, an anti-TREM2 antibody enhances the migration, survival, and/or differentiation of macrophages. In some embodiments, an anti-TREM2 antibody enhances the migration, survival, and/or differentiation of microglia. In some embodiments, an anti-TREM2 antibody enhances microglia activation. In some embodiments, an anti-TREM2 antibody enhances the migration, survival, and/or differentiation of disease-associated microglia. In some embodiments, an anti-TREM2 antibody enhances cell migration, cell survival, or cell differentiation without blocking binding of a native TREM2 ligand.

[0216] In some embodiments, an anti-TREM2 antibody enhances cell migration, cell survival, or cell differentiation if the level of activity (e.g., migration, survival, or differentiation) in a sample treated with the anti-TREM2 antibody is increased by at least 10%, at least 20%, at least 30%, at least 40%, at least 50%, at least 60%, at least 70%, at least 80%, at least 90% or more as compared to a control value. In some embodiments, an anti-TREM2 antibody enhances cell migration, cell survival, or cell differentiation if the level of activity (e.g., migration, survival, or differentiation) in a sample treated with the anti-TREM2 antibody is increased by at least 2-fold, 3-fold, 4-fold, 5-fold, 6-fold, 7-fold, 8-fold, 9-fold, 10-fold, or more as compared to a control value. In some embodiments, the control value is the level of activity (e.g., migration, survival, or differentiation) in an untreated sample (e.g., a sample that has not been treated with an anti-TREM2 antibody) or a sample treated with an appropriate non-TREM2-binding antibody.

[0217] In some embodiments, an anti-TREM2 antibody enhances cell migration, cell survival, or cell differentiation in the presence of a ligand. In some embodiments, an anti-TREM2 antibody enhances cell migration, cell survival, or cell differentiation in the presence of a ligand if the level of activity (e.g., migration, survival, or differentiation) in a sample treated with a TREM2 ligand and the anti-TREM2 antibody is increased by at least 10%, at least 20%, at least 30%, at least 40%, at least 50%, at least 60%, at least 70%, at least 80%, at least 90% or more as compared to a control value. In some embodiments, an anti-TREM2 antibody enhances cell migration, cell survival, or cell differentiation in the presence of a ligand if the level of activity (e.g., migration, survival, or differentiation) in a sample treated with a TREM2 ligand and the anti-TREM2 antibody is increased by at least 2-fold, 3-fold, 4-fold, 5-fold, 6-fold, 7-fold, 8-fold, 9-fold, 10-fold, or more as compared to a control value. In some embodiments, the control value is the level of activity (e.g., migration, survival, or differentiation) in an untreated sample (e.g., a sample that has not been treated with a TREM2 ligand or an anti-TREM2 antibody) or a sample treated with an appropriate non-TREM2-binding antibody.

[0218] In some embodiments, an anti-TREM2 antibody enhances cell migration, cell survival, or cell differentiation in the presence of a ligand but not in the absence of a ligand. In some embodiments, an anti-TREM2 antibody enhances cell migration, cell survival, or cell differentiation in the presence but not the absence of a ligand if the level of activity (e.g., migration, survival, or differentiation) in a sample treated with a TREM2 ligand and the anti-TREM2 antibody is increased by at least 10%, at least 20%, at least 30%, at least 40%, at least 50%, at least 60%, at least 70%, at least 80%, at least 90% or more as compared to a control value, and if the level of activity in a sample treated with the anti-TREM2 antibody but not the TREM2 ligand is not substantially increased as compared to a control value (e.g., is not increased more than 10% or more than 5% as compared to the control value). In some embodiments, an anti-TREM2 antibody enhances cell migration, cell survival, or cell differentiation in the presence but not the absence of a ligand if the level of activity (e.g., migration, survival, or differentiation) in a sample treated with a TREM2 ligand and the anti-TREM2 antibody is increased by at least 2-fold, 3-fold, 4-fold, 5-fold, 6-fold, 7-fold, 8-fold, 9-fold, 10-fold, or more as compared to a control value, and if the level of activity in a sample treated with the anti-TREM2 antibody but not the TREM2 ligand is not substantially increased as compared to a control value (e.g., is not increased more than 1.5-fold or more than 1-fold as compared to the control value). In some embodiments, the control value is the level of activity (e.g., migration, survival, or differentiation) in an untreated sample (e.g., a sample that has not been treated with a TREM2 ligand or an anti-TREM2 antibody) or a sample treated with an appropriate non-TREM2-binding antibody.

[0219] In some embodiments, an anti-TREM2 antibody inhibits cell migration, cell survival, or cell differentiation (e.g., for myeloid cells, macrophages, and microglia, including disease-associated microglia). In some embodiments, an anti-TREM2 antibody inhibits cell migration of one or more cell types (e.g., myeloid cells, macrophages, or microglia). In some embodiments, an anti-TREM2 antibody inhibits cell survival of one or more cell types (e.g., myeloid cells, macrophages, or microglia). In some embodiments, an anti-TREM2 antibody inhibits cell differentiation of one or more cell types (e.g., myeloid cells, macrophages, or microglia). In some embodiments, an anti-TREM2 antibody inhibits the migration, survival, and/or differentiation of myeloid cells. In some embodiments, an anti-TREM2 antibody inhibits the migration, survival, and/or differentiation of macrophages. In some embodiments, an anti-TREM2 antibody inhibits the migration, survival, and/or differentiation of microglia. In some embodiments, an anti-TREM2 antibody inhibits microglia activation. In some embodiments, an anti-TREM2 antibody inhibits the migration, survival, and/or differentiation of disease-associated microglia.

[0220] In some embodiments, an anti-TREM2 antibody inhibits cell migration, cell survival, or cell differentiation if the level of activity (e.g., migration, survival, or differentiation) in a sample treated with the anti-TREM2 antibody is decreased by at least 10%, at least 20%, at least 30%, at least 40%, at least 50%, at least 60%, at least 70%, at least 80%, at least 90% or more as compared to a control value. In some embodiments, an anti-TREM2 antibody inhibits cell migration, cell survival, or cell differentiation if the level of activity (e.g., migration, survival, or differentiation) in a sample treated with the anti-TREM2 antibody is decreased by at least 2-fold, 3-fold, 4-fold, 5-fold, 6-fold, 7-fold, 8-fold, 9-fold, 10-fold or more as compared to a control value. In some embodiments, the control value is the level of Syk phosphorylation in an untreated sample (e.g., a sample that has not been treated with an anti-TREM2 antibody) or a sample treated with an appropriate non-TREM2-binding antibody.

[0221] In some embodiments, an anti-TREM2 antibody inhibits cell migration, cell survival, or cell differentiation in the presence of a ligand. In some embodiments, an anti-TREM2 antibody inhibits cell migration, cell survival, or cell differentiation in the presence of a ligand if the level of activity (e.g., migration, survival, or differentiation) in a sample treated with a TREM2 ligand and the anti-TREM2 antibody is decreased by at least 10%, at least 20%, at least 30%, at least 40%, at least 50%, at least 60%, at least 70%, at least 80%, at least 90% or more as compared to a control value. In some embodiments, an anti-TREM2 antibody inhibits cell migration, cell survival, or cell differentiation in the presence of a ligand if the level of activity (e.g., migration, survival, or differentiation) in a sample treated with a TREM2 ligand and the anti-TREM2 antibody is decreased by at least 2-fold, 3-fold, 4-fold, 5-fold, 6-fold, 7-fold, 8-fold, 9-fold, 10-fold or more as compared to a control value. In some embodiments, the control value is the level of activity (e.g., migration, survival, or differentiation) in an untreated sample (e.g., a sample that has not been treated with a TREM2 ligand or an anti-TREM2 antibody) or a sample treated with an appropriate non-TREM2-binding antibody.

[0222] In some embodiments, an anti-TREM2 antibody inhibits cell migration, cell survival, or cell differentiation in the presence of a ligand but not in the absence of a ligand. In some embodiments, an anti-TREM2 antibody inhibits cell migration, cell survival, or cell differentiation in the presence but not the absence of a ligand if the level of activity (e.g., migration, survival, or differentiation) in a sample treated with a TREM2 ligand and the anti-TREM2 antibody is decreased by at least 10%, at least 20%, at least 30%, at least 40%, at least 50%, at least 60%, at least 70%, at least 80%, at least 90% or more as compared to a control value, and if the level of activity in a sample treated with the anti-TREM2 antibody but not the TREM2 ligand is not substantially decreased as compared to a control value (e.g., is not decreased more than 10% or more than 5% as compared to the control value). In some embodiments, an anti-TREM2 antibody inhibits cell migration, cell survival, or cell differentiation in the presence but not the absence of a ligand if the level of activity (e.g., migration, survival, or differentiation) in a sample treated with a TREM2 ligand and the anti-TREM2 antibody is decreased by at least 2-fold, 3-fold, 4-fold, 5-fold, 6-fold, 7-fold, 8-fold, 9-fold, 10-fold or more as compared to a control value, and if the level of activity in a sample treated with the anti-TREM2 antibody but not the TREM2 ligand is not substantially decreased as compared to a control value (e.g., is not decreased more than 1.5-fold or more than 1-fold as compared to the control value). In some embodiments, the control value is the level of activity (e.g., migration, survival, or differentiation) in an untreated sample (e.g., a sample that has not been treated with a TREM2 ligand or an anti-TREM2 antibody).

[0223] In some embodiments, cell migration is measured using a chemotaxis assay. Chemotaxis assays are known in the art. In some embodiments, the cell migration assay (e.g., chemotaxis assay) is performed on a sample comprising cells that endogenously express TREM2, such as human macrophages. In some embodiments, the cell migration assay (e.g., chemotaxis assay) is performed on a sample comprising cells that have been engineered to express TREM2. In some embodiments, cell migration is measured using a human macrophage chemotaxis assay as described in the Examples section below.

[0224] In some embodiments, cell survival is measured using a cell viability assay. Cell viability assays are known in the art. In some embodiments, the cell survival assay (e.g., cell viability assay) is performed on a sample comprising cells that endogenously express TREM2, such as human macrophages. In some embodiments, the cell survival assay (e.g., cell viability assay) is performed on a sample comprising cells that have been engineered to express TREM2. In some embodiments, cell survival is measured using a human macrophage viability assay as described in the Examples section below.

[0225] In some embodiments, cell differentiation is measured by evaluating the ability of cells that endogenously express TREM2 to differentiate. For example, in some embodiments, cell differentiation is measured by evaluating the ability of macrophages to differentiate from monocytes, e.g., as described in the Examples section below.

[0226] In some embodiments, activation of microglia is measured in vivo. In some embodiments, microglia activation is measured using TSPO-PET imaging. TSPO-PET imaging methods are known in the art.

[0227] In some embodiments, an anti-TREM2 antibody enhances microglia function without increasing neuroinflammation. Levels of neuroinflammation can be determined by measuring levels of cytokines (e.g., inflammatory cytokines), such as but not limited to TNF-α, IL-1β, IL-6, IL-1ra, TGFβ, IL-15, or IFN-γ. In some embodiments, cytokine levels are measured using immunoassays, for example, an enzyme immunoassay (EIA), enzyme multiplied immunoassay (EMIA), enzyme-linked immunosorbent assay (ELISA), microparticle enzyme immunoassay (MEIA), immunohistochemistry (IHC), immunocytochemistry, capillary electrophoresis immunoassay (CEIA), radioimmunoassay (RIA), immunofluorescence, chemiluminescence immunoassay (CL), or electrochemiluminescence immunoassay (ECL).

[0228] TREM2 Ligands

[0229] In some embodiments, a TREM2 ligand is a lipid ligand as described herein, e.g., as described in Example 4 below. In some embodiments, the TREM2 ligand is selected from the group consisting of 1-palmitoyl-2-(5′-oxo-valeroyl)-sn-glycero-3-phosphocholine (POVPC), 2-Arachidonoylglycerol (2-AG), 7-ketocholesterol (7-KC), 24(S)hydroxycholesterol (240HC), 25 (S)hydroxycholesterol (25OHC), 27-hydroxycholesterol (270HC), Acyl Carnitine (AC), alkylacylglycerophosphocholine (PAF), α-galactosylceramide (KRN7000), Bis(monoacylglycero)phosphate (BMP), Cardiolipin (CL), Ceramide, Ceramide-1-phosphate (C1P), Cholesteryl ester (CE), Cholesterol phosphate (CP), Diacylglycerol 34:1 (DG 34:1), Diacylglycerol 38:4 (DG 38:4), Diacylglycerol pyrophosphate (DGPP), Dihyrdoceramide (DhCer), Dihydrosphingomyelin (DhSM), Ether phosphatidylcholine (PCe), Free cholesterol (FC), Galactosylceramide (GalCer), Galactosylsphingosine (GalSo), Ganglioside GM1, Ganglioside GM3, Glucosylsphingosine (GlcSo), Hank's Balanced Salt Solution (HBSS), Kdo2-Lipid A (KLA), Lactosylceramide (LacCer), lysoalkylacylglycerophosphocholine (LPAF), Lysophosphatidic acid (LPA), Lysophosphatidylcholine (LPC), Lysophosphatidylethanolamine (LPE), Lysophosphatidylglycerol (LPG), Lysophosphatidylinositol (LPI), Lysosphingomyelin (LSM), Lysophosphatidylserine (LPS), N-Acyl-phosphatidylethanolamine (NAPE), N-Acyl-Serine (NSer), Oxidized phosphatidylcholine (oxPC), Palmitic-acid-9-hydroxy-stearic-acid (PAHSA), Phosphatidylethanolamine (PE), Phosphatidylethanol (PEtOH), Phosphatidic acid (PA), Phosphatidylcholine (PC), Phosphatidylglycerol (PG), Phosphatidylinositol (PI), Phosphatidylserine (PS), Sphinganine, Sphinganine-1-phosphate (Sa1P), Sphingomyelin (SM), Sphingosine, Sphingosine-1-phosphate (So1P), and Sulfatide.

[0230] In some embodiments, an anti-TREM2 antibody as described herein interacts with one or more lipid ligands (e.g., a lipid ligand as described herein) to modulate TREM2 activity. In some embodiments, an anti-TREM2 antibody as described herein interacts with one or more lipid ligands to modulate a TREM2 signaling pathway involving a kinase that interacts with the TREM2/DAP12 signaling complex, such as, but not limited to, Syk, ZAP70, PI3K, Erk, AKT, or GSK3b. In some embodiments, the anti-TREM2 antibody interacts with the lipid ligand to activate Syk, ZAP70, PI3K, Erk, AKT, or GSK3b. In some embodiments, the anti-TREM2 antibody exhibits an additive effect with the lipid ligand on the activation of the signaling pathway (e.g., Syk, ZAP70, PI3K, Erk, AKT, or GSK3b). In some embodiments, the anti-TREM2 antibody exhibits an additive effect with the lipid ligand on the activation of p-Syk. In some embodiments, the anti-TREM2 antibody exhibits a blocking effect on the lipid ligand activation of the signaling pathway (e.g., Syk, ZAP70, PI3K, Erk, AKT, or GSK3b). In some embodiments, the anti-TREM2 antibody exhibits a blocking effect on the lipid ligand activation of p-Syk.

[0231] In some embodiments, an anti-TREM2 antibody exhibits an additive effect with the lipid ligand on the activation of a TREM2 signaling pathway component (e.g., p-Syk) and recognizes an epitope that is the same or substantially the same as the epitope recognized by antibody clone RS9.F6, 22B8.B1, 3D3.A1, 42E8.H1, 43E9.H1, 21D6.G2, 59C6.F1, 53H11.D3, 60A4.B1, 26E2.A3, 54C2.A1, 44E2.H1, 22G9.D1, 49H11.B1, 14D5.F1, 26D11.B1, 52H9.D1, or 7B10.A2. In some embodiments, an anti-TREM2 antibody exhibits a blocking effect with the lipid ligand on the activation of a TREM2 signaling pathway component (e.g., p-Syk) and recognizes an epitope that is the same or substantially the same as the epitope recognized by antibody clone RS9.F10, 13B11.A1, 21D4.D1, 30A8.A1, 57D7.A1, 24B4.A1, 39H10.A1, 55B9.A1, 14H11.B1, 40H3.A4, 30F2.A1, 51D4.A1, 26D2.D1, 21D11.B1, 44E3.B1, 26D5.A1, 38E9.E5, RS9.E2, or 2G4.B1.

### Binding Characteristics of Anti-TREM2 Antibodies

[0232] In some embodiments, an antibody that specifically binds to a TREM2 protein as described herein binds to TREM2 that is expressed on a cell (e.g., a primary cell or cell line that endogenously expresses TREM2, such as human macrophages, or a primary cell or cell line that has been engineered to express TREM2, e.g., as described in the Examples section below). In some embodiments, an antibody that specifically binds to a TREM2 protein as described herein binds to purified or recombinant TREM2 protein or to a chimeric protein comprising TREM2 or a portion thereof (e.g., an Fc-fusion protein comprising TREM2 or an Fc-fusion protein comprising the ecto-domain of TREM2).

[0233] In some embodiments, an antibody that specifically binds to human TREM2 protein exhibits cross-reactivity with one or more other TREM2 proteins of another species. In some embodiments, an antibody that specifically binds to human TREM2 protein exhibits cross-reactivity with a mouse TREM2 protein. In some embodiments, an antibody that specifically binds to human TREM2 protein exhibits cross-reactivity with a cynomolgus monkey (“cyno”) TREM2 protein. In some embodiments, an antibody that specifically binds to human TREM2 protein exhibits cross-reactivity with a rat TREM2 protein. In some embodiments, an antibody that specifically binds to human TREM2 protein exhibits cross-reactivity with one, two, or all three of mouse TREM2, cyno TREM2, and rat TREM2. In some embodiments, an anti-TREM2 antibody exhibits cross-reactivity with human TREM2, cyno TREM2, and mouse TREM2.

[0234] Methods for analyzing binding affinity, binding kinetics, and cross-reactivity are known in the art. These methods include, but are not limited to, solid-phase binding assays (e.g., ELISA assay), immunoprecipitation, surface plasmon resonance (e.g., Biacore™ (GE Healthcare, Piscataway, N.J.)), kinetic exclusion assays (e.g., KinExA®), flow cytometry, fluorescence-activated cell sorting (FACS), BioLayer interferometry (e.g., Octet™ (FortéBio, Inc., Menlo Park, Calif.)), and western blot analysis. In some embodiments, ELISA is used to determine binding affinity and/or cross-reactivity. Methods for performing ELISA assays are known in the art, and are also described in the Examples section below. In some embodiments, surface plasmon resonance (SPR) is used to determine binding affinity, binding kinetics, and/or cross-reactivity. In some embodiments, kinetic exclusion assays are used to determine binding affinity, binding kinetics, and/or cross-reactivity. In some embodiments, BioLayer interferometry assays are used to determine binding affinity, binding kinetics, and/or cross-reactivity.

### Epitopes Recognized by Anti-TREM2 Antibodies

[0235] In some embodiments, an anti-TREM2 antibody recognizes an epitope of human TREM2 that is the same or substantially the same as the epitope recognized by an antibody clone as described herein. As used herein, the term “substantially the same,” as used with reference to an epitope recognized by an antibody clone as described herein, means that the anti-TREM2 antibody recognizes an epitope that is identical, within, or nearly identical to (e.g., has at least 90% sequence identity to, or has one, two, or three amino acid substitutions, e.g., conservative substitutions, relative to), or has substantial overlap with (e.g., at least 50%, 60%, 70%, 80%, 90%, or 95% overlap with) the epitope recognized by the antibody clone as described herein.

[0236] In some embodiments, the anti-TREM2 antibody recognizes an epitope of human TREM2 that is the same or substantially the same as the epitope recognized by an antibody clone selected from the group consisting of 2G4.B1, 3D3.A1, 7B10.A2, 8A11.B1, 13B11.A1, 14D5.F1, 14H11.A1, 19F10.F3, 21D4.D1, 21D6.G2, 21D11, 22B8.B1, 22G9.D1, 24B4.A1, 26D2.D1, 26D5.A1, 26D11.B1, 26E2.A3, 30A8.A1, 30F2.A2, 38E9.E5, 39H10.A1, 40H3.A4, 42E8.H1, 43E9.H1, 44E2.H1, 44E3.B1, 49H11.B1, 51D4, 52H9.D1, 53H11.D3, 54C2.A1, 55B9.A1, 57D7.A1, 59C6.F1, 60A4.B1, RS9.E2, RS9.F6, RS9.F10. RS11.1F5, RS11.1G6, RS11.1A10, RS11.1D11, RS11.4A5, RS11.4H6, RS11.4D7, RS11.4D9, RS11.4F11, RS12.1C6, RS12.1C10, RS12.2D1, RS12.2D4, RS12.2E1, RS12.2F2, RS12.2G1, RS12.2H1, and RS12.3C10.

[0237] In some embodiments, the anti-TREM2 antibody recognizes an epitope of human TREM2 that is identical to the epitope recognized by an antibody clone selected from the group consisting of 2G4.B1, 3D3.A1, 7B10.A2, 8A11.B1, 13B11.A1, 14D5.F1, 14H11.A1, 19F10.F3, 21D4.D1, 21D6.G2, 21D11, 22B8.B1, 22G9.D1, 24B4.A1, 26D2.D1, 26D5.A1, 26D11.B1, 26E2.A3, 30A8.A1, 30F2.A2, 38E9.E5, 39H10.A1, 40H3.A4, 42E8.H1, 43E9.H1, 44E2.H1, 44E3.B1, 49H11.B1, 51D4, 52H9.D1, 53H11.D3, 54C2.A1, 55B9.A1, 57D7.A1, 59C6.F1, 60A4.B1, RS9.E2, RS9.F6, RS9.F10, RS11.1F5, RS11.1G6, RS11.1A10, RS11.1D11, RS11.4A5, RS11.4H6, RS11.4D7, RS11.4D9, RS11.4F11, RS12.1C6, RS12.1C10, RS12.2D1, RS12.2D4, RS12.2E1, RS12.2F2, RS12.2G1, RS12.2H1, and RS12.3C10.

[0238] In some embodiments, the anti-TREM2 antibody recognizes an epitope of human TREM2 that is within the epitope recognized by an antibody clone selected from the group consisting of 2G4.B1, 3D3.A1, 7B10.A2, 8A11.B1, 13B11.A1, 14D5.F1, 14H11.A1, 19F10.F3, 21D4.D1, 21D6.G2, 21D11, 22B8.B1, 22G9.D1, 24B4.A1, 26D2.D1, 26D5.A1, 26D11.B1, 26E2.A3, 30A8.A1, 30F2.A2, 38E9.E5, 39H10.A1, 40H3.A4, 42E8.H1, 43E9.H1, 44E2.H1, 44E3.B1, 49H11.B1, 51D4, 52H9.D1, 53H11.D3, 54C2.A1, 55B9.A1, 57D7.A1, 59C6.F1, 60A4.B1, RS9.E2, RS9.F6, RS9.F10, RS11.1F5, RS11.1G6, RS11.1A10, RS11.1D11, RS11.4A5, RS11.4H6, RS11.4D7, RS11.4D9, RS11.4F11, RS12.1C6, RS12.1C10, RS12.2D1, RS12.2D4, RS12.2E1, RS12.2F2, RS12.2G1, RS12.2H1, and RS12.3C10.

[0239] In some embodiments, the anti-TREM2 antibody recognizes an epitope of human TREM2 that has at least 90% identity (e.g., at least 91%, 92%, 93%, 94%, 95%, 96%, 97%, 98%, or 99%) to the epitope recognized by an antibody clone selected from the group consisting of 2G4.B1, 3D3.A1, 7B10.A2, 8A11.B1, 13B11.A1, 14D5.F1, 14H11.A1, 19F10.F3, 21D4.D1, 21D6.G2, 21D11, 22B8.B1, 22G9.D1, 24B4.A1, 26D2.D1, 26D5.A1, 26D11.B1, 26E2.A3, 30A8.A1, 30F2.A2, 38E9.E5, 39H10.A1, 40H3.A4, 42E8.H1, 43E9.H1, 44E2.H1, 44E3.B1, 49H11.B1, 51D4, 52H9.D1, 53H11.D3, 54C2.A1, 55B9.A1, 57D7.A1, 59C6.F1, 60A4.B1, RS9.E2, RS9.F6, RS9.F10, RS11.1F5, RS11.1G6, RS11.1A10, RS11.1D11, RS11.4A5, RS11.4H6, RS11.4D7, RS11.4D9, RS11.4F11, RS12.1C6, RS12.1C10, RS12.2D1, RS12.2D4, RS12.2E1, RS12.2F2, RS12.2G1, RS12.2H1, and RS12.3C10.

[0240] In some embodiments, the anti-TREM2 antibody recognizes an epitope of human TREM2 that has one, two, or three amino acid substitutions (e.g., conservative substitutions) relative to the epitope recognized by an antibody clone selected from the group consisting of 2G4.B1, 3D3.A1, 7B10.A2, 8A11.B1, 13B11.A1, 14D5.F1, 14H11.A1, 19F10.F3, 21D4.D1, 21D6.G2, 21D11, 22B8.B1, 22G9.D1, 24B4.A1, 26D2.D1, 26D5.A1, 26D11.B1, 26E2.A3, 30A8.A1, 30F2.A2, 38E9.E5, 39H10.A1, 40H3.A4, 42E8.H1, 43E9.H1, 44E2.H1, 44E3.B1, 49H11.B1, 51D4, 52H9.D1, 53H11.D3, 54C2.A1, 55B9.A1, 57D7.A1, 59C6.F1, 60A4.B1, RS9.E2, RS9.F6, RS9.F10, RS11.1F5, RS11.1G6, RS11.1A10, RS11.1D11, RS11.4A5, RS11.4H6, RS11.4D7, RS11.4D9, RS11.4F11, RS12.1C6, RS12.1C10, RS12.2D1, RS12.2D4, RS12.2E1, RS12.2F2, RS12.2G1, RS12.2H1, and RS12.3C10.

[0241] In some embodiments, an anti-TREM2 antibody recognizes an epitope of human TREM2 that substantially overlaps (e.g., has at least 50%, 60%, 70%, 80%, 90%, or 95% overlap) with the epitope recognized by an antibody clone selected from the group consisting of 2G4.B1, 3D3.A1, 7B10.A2, 8A11.B1, 13B11.A1, 14D5.F1, 14H11.A1, 19F10.F3, 21D4.D1, 21D6.G2, 21D11, 22B8.B1, 22G9.D1, 24B4.A1, 26D2.D1, 26D5.A1, 26D11.B1, 26E2.A3, 30A8.A1, 30F2.A2, 38E9.E5, 39H10.A1, 40H3.A4, 42E8.H1, 43E9.H1, 44E2.H1, 44E3.B1, 49H11.B1, 51D4, 52H9.D1, 53H11.D3, 54C2.A1, 55B9.A1, 57D7.A1, 59C6.F1, 60A4.B1, RS9.E2, RS9.F6, RS9.F10, RS11.1F5, RS11.1G6, RS11.1A10, RS11.1D11, RS11.4A5, RS11.4H6, RS11.4D7, RS11.4D9, RS11.4F11, RS12.1C6, RS12.1C10, RS12.2D1, RS12.2D4, RS12.2E1, RS12.2F2, RS12.2G1, RS12.2H1, and RS12.3C10.

[0242] In some embodiments, an anti-TREM2 antibody decreases levels of sTREM2 and recognizes an epitope that is the same or substantially the same as the epitope recognized by antibody clone 42E8.H1. In some embodiments, the anti-TREM2 antibody decreases levels of sTREM2 and recognizes an epitope of human TREM2 that is identical to the epitope recognized by antibody clone 42E8.H1. In some embodiments, the anti-TREM2 antibody decreases levels of sTREM2 and recognizes an epitope of human TREM2 that is within the epitope recognized by antibody clone 42E8.H1. In some embodiments, the anti-TREM2 antibody decreases levels of sTREM2 and recognizes an epitope of human TREM2 that has at least 90% identity to the epitope recognized by antibody clone 42E8.H1. In some embodiments, the anti-TREM2 antibody decreases levels of sTREM2 and recognizes an epitope of human TREM2 that has one, two, or three amino acid substitutions (e.g., conservative substitutions) relative to the epitope recognized by antibody clone 42E8.H1.

[0243] In some embodiments, an anti-TREM2 antibody increases levels of sTREM2 and recognizes an epitope that is the same or substantially the same as the epitope recognized by antibody clone 21D4.D1. In some embodiments, the anti-TREM2 antibody increases levels of sTREM2 and recognizes an epitope of human TREM2 that is identical to the epitope recognized by antibody clone 21D4.D1. In some embodiments, the anti-TREM2 antibody increases levels of sTREM2 and recognizes an epitope of human TREM2 that is within the epitope recognized by antibody clone 21D4.D1. In some embodiments, the anti-TREM2 antibody increases levels of sTREM2 and recognizes an epitope of human TREM2 that has at least 90% identity to the epitope recognized by antibody clone 21D4.D1. In some embodiments, the anti-TREM2 antibody increases levels of sTREM2 and recognizes an epitope of human TREM2 that has one, two, or three amino acid substitutions (e.g., conservative substitutions) relative to the epitope recognized by antibody clone 21D4.D1.

[0244] In some embodiments, an anti-TREM antibody enhances TREM2 activity (e.g., induces kinase phosphorylation, enhances phagocytosis, and/or enhances cell migration, differentiation, or survival) and recognizes an epitope that is the same or substantially the same as the epitope recognized by antibody clone 2G4.B1, 3D3.A1, 7B10.A2, 13B11.A1, 14H11.A1, 21D6.G2, 22G9.D1, 24B4.A1, 26D2.D1, 26E2.A3, 30A8.A1, 38E9.E5, 39H10.A1, 42E8.H1, 43E9.H1, 44E2.H1, 49H11.B1, 52H9.D1, 53H11.D3, 54C2.A1, 55B9.A1, 57D7.A1, 60A4.B1, RS9.E2, RS9.F6, or RS9.F10. In some embodiments, the anti-TREM2 antibody enhances TREM2 activity and recognizes an epitope of human TREM2 that is identical to the epitope recognized by an antibody clone selected from the group consisting of 2G4.B1, 3D3.A1, 7B10.A2, 13B11.A1, 14H11.A1, 21D6.G2, 22G9.D1, 24B4.A1, 26D2.D1, 26E2.A3, 30A8.A1, 38E9.E5, 39H10.A1, 42E8.H1, 43E9.H1, 44E2.H1, 49H11.B1, 52H9.D1, 53H11.D3, 54C2.A1, 55B9.A1, 57D7.A1, 60A4.B1, RS9.E2, RS9.F6, and RS9.F10. In some embodiments, the anti-TREM2 antibody enhances TREM2 activity and recognizes an epitope of human TREM2 that is within the epitope recognized by an antibody clone selected from the group consisting of 2G4.B1, 3D3.A1, 7B10.A2, 13B11.A1, 14H11.A1, 21D6.G2, 22G9.D1, 24B4.A1, 26D2.D1, 26E2.A3, 30A8.A1, 38E9.E5, 39H10.A1, 42E8.H1, 43E9.H1, 44E2.H1, 49H11.B1, 52H9.D1, 53H11.D3, 54C2.A1, 55B9.A1, 57D7.A1, 60A4.B1, RS9.E2, RS9.F6, and RS9.F10. In some embodiments, the anti-TREM2 antibody enhances TREM2 activity and recognizes an epitope of human TREM2 that has at least 90% identity to the epitope recognized by an antibody clone selected from the group consisting of 2G4.B1, 3D3.A1, 7B10.A2, 13B11.A1, 14H11.A1, 21D6.G2, 22G9.D1, 24B4.A1, 26D2.D1, 26E2.A3, 30A8.A1, 38E9.E5, 39H10.A1, 42E8.H1, 43E9.H1, 44E2.H1, 49H11.B1, 52H9.D1, 53H11.D3, 54C2.A1, 55B9.A1, 57D7.A1, 60A4.B1, RS9.E2, RS9.F6, and RS9.F10. In some embodiments, the anti-TREM2 antibody enhances TREM2 activity and recognizes an epitope of human TREM2 that has one, two, or three amino acid substitutions (e.g., conservative substitutions) relative to the epitope recognized by an antibody clone selected from the group consisting of 2G4.B1, 3D3.A1, 7B10.A2, 13B11.A1, 14H11.A1, 21D6.G2, 22G9.D1, 24B4.A1, 26D2.D1, 26E2.A3, 30A8.A1, 38E9.E5, 39H10.A1, 42E8.H1, 43E9.H1, 44E2.H1, 49H11.B1, 52H9.D1, 53H11.D3, 54C2.A1, 55B9.A1, 57D7.A1, 60A4.B1, RS9.E2, RS9.F6, and RS9.F10.

[0245] In some embodiments, an anti-TREM antibody inhibits TREM2 activity (e.g., inhibits kinase phosphorylation, inhibits phagocytosis, and/or inhibits cell migration, differentiation, or survival) and recognizes an epitope that is the same or substantially the same as the epitope recognized by antibody clone 21D4.D1 or 21D11. In some embodiments, the anti-TREM2 antibody inhibits TREM2 activity and recognizes an epitope of human TREM2 that is identical to the epitope recognized by antibody clone 21D4.D1 or 21D11. In some embodiments, the anti-TREM2 antibody inhibits TREM2 activity and recognizes an epitope of human TREM2 that is within the epitope recognized by antibody clone 21D4.D1 or 21D11. In some embodiments, the anti-TREM2 antibody inhibits TREM2 activity and recognizes an epitope of human TREM2 that has at least 90% identity to the epitope recognized by antibody clone 21D4.D1 or 21D11. In some embodiments, the anti-TREM2 antibody inhibits TREM2 activity and recognizes an epitope of human TREM2 that has one, two, or three amino acid substitutions (e.g., conservative substitutions) relative to the epitope recognized by antibody clone 21D4.D1 or 21D11.

[0246] In some embodiments, an anti-TREM2 antibody enhances TREM2 activity (e.g., induces kinase phosphorylation, enhances phagocytosis, and/or enhances cell migration, differentiation, or survival) that is induced by a ligand and recognizes an epitope that is the same or substantially the same as the epitope recognized by antibody clone 3D3.A1, 8A11.B1, 14D5.F1, 19F10.F3, 21D6.G2, 22B8.B1, 22G9.D1, 26D11.B1, 26E.2.A3, 30A8.A1, 42E8.H1, 43E9.H1, 44E2.H1, 49H11.B1, 52H9.D1, 53H11.D3, 54C2.A1, 59C6.F1, 60A4.B1, RS9.F6, or RS9.F10. In some embodiments, the anti-TREM2 antibody enhances TREM2 activity that is induced by a ligand and recognizes an epitope of human TREM2 that is identical to the epitope recognized by an antibody clone selected from the group consisting of 3D3.A1, 8A11.B1, 14D5.F1, 19F10.F3, 21D6.G2, 22B8.B1, 22G9.D1, 26D11.B1, 26E.2.A3, 30A8.A1, 42E8.H1, 43E9.H1, 44E2.H1, 49H11.B1, 52H9.D1, 53H11.D3, 54C2.A1, 59C6.F1, 60A4.B1, RS9.F6, and RS9.F10. In some embodiments, the anti-TREM2 antibody enhances TREM2 activity that is induced by a ligand and recognizes an epitope of human TREM2 that is within the epitope recognized by an antibody clone selected from the group consisting of 3D3.A1, 8A11.B1, 14D5.F1, 19F10.F3, 21D6.G2, 22B8.B1, 22G9.D1, 26D11.B1, 26E.2.A3, 30A8.A1, 42E8.H1, 43E9.H1, 44E2.H1, 49H11.B1, 52H9.D1, 53H11.D3, 54C2.A1, 59C6.F1, 60A4.B1, RS9.F6, and RS9.F10. In some embodiments, the anti-TREM2 antibody enhances TREM2 activity that is induced by a ligand and recognizes an epitope of human TREM2 that has at least 90% identity to the epitope recognized by an antibody clone selected from the group consisting of 3D3.A1, 8A11.B1, 14D5.F1, 19F10.F3, 21D6.G2, 22B8.B1, 22G9.D1, 26D11.B1, 26E.2.A3, 30A8.A1, 42E8.H1, 43E9.H1, 44E2.H1, 49H11.B1, 52H9.D1, 53H11.D3, 54C2.A1, 59C6.F1, 60A4.B1, RS9.F6, and RS9.F10. In some embodiments, the anti-TREM2 antibody enhances TREM2 activity that is induced by a ligand and recognizes an epitope of human TREM2 that has one, two, or three amino acid substitutions (e.g., conservative substitutions) relative to the epitope recognized by an antibody clone selected from the group consisting of 3D3.A1, 8A11.B1, 14D5.F1, 19F10.F3, 21D6.G2, 22B8.B1, 22G9.D1, 26D11.B1, 26E.2.A3, 30A8.A1, 42E8.H1, 43E9.H1, 44E2.H1, 49H11.B1, 52H9.D1, 53H11.D3, 54C2.A1, 59C6.F1, 60A4.B1, RS9.F6, and RS9.F10.

[0247] In some embodiments, an anti-TREM2 antibody inhibits TREM2 activity (e.g., induces kinase phosphorylation, enhances phagocytosis, and/or enhances cell migration, differentiation, or survival) that is induced by a ligand and recognizes an epitope that is the same or substantially the same as the epitope recognized by antibody clone 2G4.B1, 13B11.A, 14H11.A1, 21D4.D1, 21D11.B1, 24B4.A1, 26D2.D1, 26D5.A1, 30A8.A1, 30F2.A2, 38E9.E5, 39H10.A1, 40H3.A4, 44E3.B1, 51D4.A1, 55B9.A1, 57D7.A1, or RS9.E2. In some embodiments, the anti-TREM2 antibody inhibits TREM2 activity that is induced by a ligand and recognizes an epitope of human TREM2 that is identical to the epitope recognized by an antibody clone selected from the group consisting of 2G4.B1, 13B11.A, 14H11.A1, 21D4.D1, 21D11.B1, 24B4.A1, 26D2.D1, 26D5.A1, 30A8.A1, 30F2.A2, 38E9.E5, 39H10.A1, 40H3.A4, 44E3.B1, 51D4.A1, 55B9.A1, 57D7.A1, and RS9.E2. In some embodiments, the anti-TREM2 antibody inhibits TREM2 activity that is induced by a ligand and recognizes an epitope of human TREM2 that is within the epitope recognized by an antibody clone selected from the group consisting of 2G4.B1, 13B11.A, 14H11.A1, 21D4.D1, 21D11.B1, 24B4.A1, 26D2.D1, 26D5.A1, 30A8.A1, 30F2.A2, 38E9.E5, 39H10.A1, 40H3.A4, 44E3.B1, 51D4.A1, 55B9.A1, 57D7.A1, and RS9.E2. In some embodiments, the anti-TREM2 antibody inhibits TREM2 activity that is induced by a ligand and recognizes an epitope of human TREM2 that has at least 90% identity to the epitope recognized by an antibody clone selected from the group consisting of 2G4.B1, 13B11.A, 14H11.A1, 21D4.D1, 21D11.B1, 24B4.A1, 26D2.D1, 26D5.A1, 30A8.A1, 30F2.A2, 38E9.E5, 39H10.A1, 40H3.A4, 44E3.B1, 51D4.A1, 55B9.A1, 57D7.A1, and RS9.E2. In some embodiments, the anti-TREM2 antibody inhibits TREM2 activity that is induced by a ligand and recognizes an epitope of human TREM2 that has one, two, or three amino acid substitutions (e.g., conservative substitutions) relative to the epitope recognized by an antibody clone selected from the group consisting of 2G4.B1, 13B11.A, 14H11.A1, 21D4.D1, 21D11.B1, 24B4.A1, 26D2.D1, 26D5.A1, 30A8.A1, 30F2.A2, 38E9.E5, 39H10.A1, 40H3.A4, 44E3.B1, 51D4.A1, 55B9.A1, 57D7.A1, and RS9.E2.

[0248] In some embodiments, an anti-TREM2 antibody recognizes an epitope of human TREM2 comprising, within, or consisting of residues 24-43, 44-58, 64-78, 89-103, 94-108, 124-153, 140-144, or 159-174 of SEQ ID NO:96. In some embodiments, an anti-TREM2 antibody recognizes an epitope comprising, within, or consisting of residues 24-43 of SEQ ID NO:96. In some embodiments, an anti-TREM2 antibody recognizes an epitope of human TREM2 comprising, within, or consisting of residues 44-58 of SEQ ID NO:96. In some embodiments, an anti-TREM2 antibody recognizes an epitope of human TREM2 comprising, within, or consisting of residues 64-78 of SEQ ID NO:96. In some embodiments, an anti-TREM2 antibody recognizes an epitope of human TREM2 comprising, within, or consisting of residues 89-103 of SEQ ID NO:96. In some embodiments, an anti-TREM2 antibody recognizes an epitope of human TREM2 comprising, within, or consisting of residues 94-108 of SEQ ID NO:96. In some embodiments, an anti-TREM2 antibody recognizes an epitope of human TREM2 comprising, within, or consisting of residues 124-153 of SEQ ID NO:96. In some embodiments, an anti-TREM2 antibody recognizes an epitope of human TREM2 comprising, within, or consisting of residues 140-148 of SEQ ID NO:96. In some embodiments, an anti-TREM2 antibody recognizes an epitope of human TREM2 comprising, within, or consisting of residues 140-144 of SEQ ID NO:96. In some embodiments, an anti-TREM2 antibody recognizes an epitope of human TREM2 comprising, within, or consisting of residues 140-144 of SEQ ID NO:96. In some embodiments, an anti-TREM2 antibody recognizes an epitope of human TREM2 comprising, within, or consisting of residues 159-174 of SEQ ID NO:96.

[0249] In some embodiments, an anti-TREM2 antibody that recognizes an epitope of human TREM2 comprising, within, or consisting of residues 140-148 of SEQ ID NO:96 (e.g., that recognizes an epitope of human TREM2 comprising, within, or consisting of residues 140-144 of SEQ ID NO:96) makes direct contact with one or more of residues Asp140, Leu141, Trp142, Phe143, and Pro144. In some embodiments, an anti-TREM2 antibody makes direct contact with residue Trp142. In some embodiments, an anti-TREM2 antibody makes direct contact with each of residues Asp140, Leu141, Trp142, Phe143, and Pro144.

### Anti-TREM2 Antibody Sequences

[0250] In some embodiments, an anti-TREM2 antibody comprises one or more complementarity determining region (CDR), heavy chain variable region, and/or light chain variable region sequences of the antibodies described herein. In some embodiments, an anti-TREM2 antibody comprises one or more CDR, heavy chain variable region, and/or light chain variable region sequences of the antibodies described herein and further comprises one or more functional characteristics as described herein (e.g., altering levels of sTREM2 and/or modulating one or more TREM2 activities).

[0251] CDR Sequences

[0252] In some embodiments, an anti-TREM2 antibody comprises one or more complementarity determining regions (CDRs) having at least 90%, 91%, 92%, 93%, 94%, 95%, 96%, 97%, 98%, or 99% sequence identity to a CDR of an antibody clone selected from the group consisting of 2G4.B1, 3D3.A1, 7B10.A2, 13B11.A1, 14D5.F1, 14H11.A1, 21D4.D1, 21D6.G2, 21D11, 22B8.B1, 22G9.D1, 24B4.A1, 24G7, 26D2, 26D11.B1, 26E2.A3, 30A8.A1, 38E9.E5, 39H10.A1, 40H3.A4, 42E8.H1, 43E9.H1, 44E2.H1, 44E3.B1, 49H11.B1, 51D4, 53H11.D3, 54C2.A1, 55B9.A1, 57D7.A1, 59C6.F1, 60A4.B1, RS9.E2, RS9.F6, RS9.F10, RS11.1F5, RS11.1G6, RS11.1A10, RS11.1D11, RS11.4A5, RS11.4H6, RS11.4D7, RS11.4D9, RS11.4F11, RS12.1C6, RS12.1C10, RS12.2D1, RS12.2D4, RS12.2E1, RS12.2F2, RS12.2G1, RS12.2H1, and RS12.3C10; or comprises one or more CDRs having up to two amino acid substitutions (i.e., zero, one, or two amino acid substitutions) relative to a CDR of an antibody clone selected from the group consisting of 2G4.B1, 3D3.A1, 7B10.A2, 13B11.A1, 14D5.F1, 14H11.A1, 21D4.D1, 21D6.G2, 21D11, 22B8.B1, 22G9.D1, 24B4.A1, 24G7, 26D2, 26D11.B1, 26E2.A3, 30A8.A1, 38E9.E5, 39H10.A1, 40H3.A4, 42E8.H1, 43E9.H1, 44E2.H1, 44E3.B1, 49H11.B1, 51D4, 53H11.D3, 54C2.A1, 55B9.A1, 57D7.A1, 59C6.F1, 60A4.B1, RS9.E2, RS9.F6, RS9.F10, RS11.1F5, RS11.1G6, RS11.1A10, RS11.1D11, RS11.4A5, RS11.4H6, RS11.4D7, RS11.4D9, RS11.4F11, RS12.1C6, RS12.1C10, RS12.2D1, RS12.2D4, RS12.2E1, RS12.2F2, RS12.2G1, RS12.2H1, and RS12.3C10.

[0253] In some embodiments, an anti-TREM2 antibody comprises one or more of a heavy chain CDR1 (CDR-H1), a heavy chain CDR2 (CDR-H2), a heavy chain CDR3 (CDR-H3), a light chain CDR1 (CDR-L1), a light chain CDR2 (CDR-L2), and a light chain CDR3 (CDR-L3) that is identical to a CDR-H1, CDR-H2, CDR-H3, CDR-L1, CDR-L2, and CDR-L3 of an antibody clone selected from the group consisting of 2G4.B1, 3D3.A1, 7B10.A2, 13B11.A1, 14D5.F1, 14H11.A1, 21D4.D1, 21D6.G2, 21D11, 22B8.B1, 22G9.D1, 24B4.A1, 24G7, 26D2, 26D11.B1, 26E2.A3, 30A8.A1, 38E9.E5, 39H10.A1, 40H3.A4, 42E8.H1, 43E9.H1, 44E2.H1, 44E3.B1, 49H11.B1, 51D4, 53H11.D3, 54C2.A1, 55B9.A1, 57D7.A1, 59C6.F1, 60A4.B1, RS9.E2, RS9.F6, RS9.F10, RS11.1F5, RS11.1G6, RS11.1A10, RS11.1D11, RS11.4A5, RS11.4H6, RS11.4D7, RS11.4D9, RS11.4F11, RS12.1C6, RS12.1C10, RS12.2D1, RS12.2D4, RS12.2E1, RS12.2F2, RS12.2G1, RS12.2H1, and RS12.3C10. In some embodiments, an anti-TREM2 antibody comprises two, three, four, five, or all six of CDR-H1, CDR-H2, CDR-H3, CDR-L1, CDR-L2, and CDR-L3 of an antibody clone selected from the group consisting of 2G4.B1, 3D3.A1, 7B10.A2, 13B11.A1, 14D5.F1, 14H11.A1, 21D4.D1, 21D6.G2, 21D11, 22B8.B1, 22G9.D1, 24B4.A1, 24G7, 26D2, 26D11.B1, 26E2.A3, 30A8.A1, 38E9.E5, 39H10.A1, 40H3.A4, 42E8.H1, 43E9.H1, 44E2.H1, 44E3.B1, 49H11.B1, 51D4, 53H11.D3, 54C2.A1, 55B9.A1, 57D7.A1, 59C6.F1, 60A4.B1, RS9.E2, RS9.F6, RS9.F10, RS11.1F5, RS11.1G6, RS11.1A10, RS11.1D11, RS11.4A5, RS11.4H6, RS11.4D7, RS11.4D9, RS11.4F11, RS12.1C6, RS12.1C10, RS12.2D1, RS12.2D4, RS12.2E1, RS12.2F2, RS12.2G1, RS12.2H1, and RS12.3C10.

[0254] In some embodiments, an anti-TREM2 antibody comprises the CDR-H1, CDR-H2, and CDR-H3 of an antibody clone selected from the group consisting of 2G4.B1, 3D3.A1, 7B10.A2, 13B11.A1, 14D5.F1, 14H11.A1, 21D4.D1, 21D6.G2, 21D11, 22B8.B1, 22G9.D1, 24B4.A1, 24G7, 26D2, 26D11.B1, 26E2.A3, 30A8.A1, 38E9.E5, 39H10.A1, 40H3.A4, 42E8.H1, 43E9.H1, 44E2.H1, 44E3.B1, 49H11.B1, 51D4, 53H11.D3, 54C2.A1, 55B9.A1, 57D7.A1, 59C6.F1, 60A4.B1, RS9.E2, RS9.F6, RS9.F10, RS11.1F5, RS11.1G6, RS11.1A10, RS11.1D11, RS11.4A5, RS11.4H6, RS11.4D7, RS11.4D9, RS11.4F11, RS12.1C6, RS12.1C10, RS12.2D1, RS12.2D4, RS12.2E1, RS12.2F2, RS12.2G1, RS12.2H1, and RS12.3C10. In some embodiments, an anti-TREM2 antibody comprises the CDR-L1, CDR-L2, and CDR-L3 of an antibody clone selected from the group consisting of 2G4.B1, 3D3.A1, 7B10.A2, 13B11.A1, 14D5.F1, 14H11.A1, 21D4.D1, 21D6.G2, 21D11, 22B8.B1, 22G9.D1, 24B4.A1, 24G7, 26D2, 26D11.B1, 26E2.A3, 30A8.A1, 38E9.E5, 39H10.A1, 40H3.A4, 42E8.H1, 43E9.H1, 44E2.H1, 44E3.B1, 49H11.B1, 51D4, 53H11.D3, 54C2.A1, 55B9.A1, 57D7.A1, 59C6.F1, 60A4.B1, RS9.E2, RS9.F6, RS9.F10, RS11.1F5, RS11.1G6, RS11.1A10, RS11.1D11, RS11.4A5, RS11.4H6, RS11.4D7, RS11.4D9, RS11.4F11, RS12.1C6, RS12.1C10, RS12.2D1, RS12.2D4, RS12.2E1, RS12.2F2, RS12.2G1, RS12.2H1, and RS12.3C10.

[0255] In some embodiments, an anti-TREM2 antibody comprises one or more CDRs selected from the group consisting of:
[0256] (a) a heavy chain CDR1 sequence having at least 90% sequence identity to the amino acid sequence of any one of SEQ ID NOs:8, 36, 39, 45, 51, 57, 62, 68, 74, 81, 85, 307, or 315 or having up to two amino acid substitutions relative to the amino acid sequence of any one of SEQ ID NOs:8, 36, 39, 45, 51, 57, 62, 68, 74, 81, 85, 307, or 315;
[0257] (b) a heavy chain CDR2 sequence having at least 90% sequence identity to the amino acid sequence of any one of SEQ ID NOs:9, 37, 40, 46, 52, 58, 63, 69, 75, 79, 82, 86, 308, or 316 or having up to two amino acid substitutions relative to the amino acid sequence of any one of SEQ ID NOs:9, 37, 40, 46, 52, 58, 63, 69, 75, 79, 82, 86, 308, or 316;
[0258] (c) a heavy chain CDR3 sequence having at least 90% sequence identity to the amino acid sequence of any one of SEQ ID NOs:10, 41, 47, 53, 59, 64, 70, 76, 83, 87, 309, or 317 or having up to two amino acid substitutions relative to the amino acid sequence of any one of SEQ ID NOs:10, 41, 47, 53, 59, 64, 70, 76, 83, 87, 309, or 317;
[0259] (d) a light chain CDR1 sequence having at least 90% sequence identity to the amino acid sequence of any one of SEQ ID NOs: 11, 42, 48, 54, 60, 65, 71, 77, 88, or 311 or having up to two amino acid substitutions relative to the amino acid sequence of any one of SEQ ID NOs:11, 42, 48, 54, 60, 65, 71, 77, 88, or 311;
[0260] (e) a light chain CDR2 sequence having at least 90% sequence identity to the amino acid sequence of any one of SEQ ID NOs: 12, 38, 43, 49, 55, 66, 72, 312, or 319 or having up to two amino acid substitutions relative to the amino acid sequence of any one of SEQ ID NOs: 12, 38, 43, 49, 55, 66, 72, 312, or 319; and
[0261] (f) a light chain CDR3 sequence having at least 90% sequence identity to the amino acid sequence of any one of SEQ ID NOs: 13, 44, 50, 56, 61, 67, 73, 78, 80, 84, 89, or 313 or having up to two amino acid substitutions relative to the amino acid sequence of any one of SEQ ID NOs:13, 44, 50, 56, 61, 67, 73, 78, 80, 84, 89, or 313.

[0262] In some embodiments, an anti-TREM2 antibody comprises two, three, four, five, or all six of (a)-(f). In some embodiments, an anti-TREM2 antibody comprises the heavy chain CDR1 of (a), the heavy chain CDR2 of (b), and the heavy chain CDR3 of (c). In some embodiments, an anti-TREM2 antibody comprises the light chain CDR1 of (d), the light chain CDR2 of (e), and the light chain CDR3 of (f). In some embodiments, a CDR having up to two amino acid substitutions has one amino acid substitution relative to the reference sequence. In some embodiments, a CDR having up to two amino acid substitutions has two amino acid substitutions relative to the reference sequence. In some embodiments, the up to two amino acid substitutions are conservative substitutions.

[0263] In some embodiments, an anti-TREM2 antibody comprises one or more CDRs selected from the group consisting of:
[0264] (a) a heavy chain CDR1 sequence comprising the amino acid sequence of any one of SEQ ID NOs:8, 36, 39, 45, 51, 57, 62, 68, 74, 81, 85, 307, or 315;
[0265] (b) a heavy chain CDR2 sequence comprising the amino acid sequence of any one of SEQ ID NOs:9, 37, 40, 46, 52, 58, 63, 69, 75, 79, 82, 86, 308, or 316;
[0266] (c) a heavy chain CDR3 sequence comprising the amino acid sequence of any one of SEQ ID NOs: 10, 41, 47, 53, 59, 64, 70, 76, 83, 87, 309, or 317;
[0267] (d) a light chain CDR1 sequence comprising the amino acid sequence of any one of SEQ ID NOs:11, 42, 48, 54, 60, 65, 71, 77, 88, or 311;
[0268] (e) a light chain CDR2 sequence comprising the amino acid sequence of any one of SEQ ID NOs: 12, 38, 43, 49, 55, 66, 72, 312, or 319; and
[0269] (f) a light chain CDR3 sequence comprising the amino acid sequence of any one of SEQ ID NOs: 13, 44, 50, 56, 61, 67, 73, 78, 80, 84, or 89.

[0270] In some embodiments, an anti-TREM2 antibody comprises two, three, four, five, or all six of (a)-(f). In some embodiments, an anti-TREM2 antibody comprises the heavy chain CDR1 of (a), the heavy chain CDR2 of (b), and the heavy chain CDR3 of (c). In some embodiments, an anti-TREM2 antibody comprises the light chain CDR1 of (d), the light chain CDR2 of (e), and the light chain CDR3 of (f).

[0271] In some embodiments, an anti-TREM2 antibody comprises one or more sequences that are variants of one or more consensus sequences. As a non-limiting example, consensus sequences can be identified by aligning heavy chain or light chain sequences (e.g., CDRs) for antibodies that are from the same (or similar) germlines. In some embodiments, consensus sequences may be generated from antibodies that contain sequences that are of the same (or similar) length and/or have at least one highly similar CDR (e.g., highly similar CDR3). In some embodiments, such sequences in these antibodies may be aligned and compared to identify conserved amino acids or motifs (i.e., where alteration in sequences may alter protein function) and/or regions where variation occurs the sequences (i.e., where variation of sequence is not likely to significantly affect protein function). Alternatively, consensus sequences can be identified by aligning heavy chain or light chain sequences (e.g., CDRs) for antibodies that bind to the same or similar (e.g., overlapping) epitopes to determine conserved amino acids or motifs (i.e., where alteration in sequences may alter protein function) and regions where variation occurs in alignment of sequences (i.e., where variation of sequence is not likely to significantly affect protein function). In some embodiments, one or more consensus sequences can be identified for antibodies that recognize the same or similar epitope as an anti-TREM2 antibody as disclosed herein (e.g., 3D3.A1, 7B10.A2, 21D4.D1, 21D11, 24B4.A1, 26D2.D1, 26E2.A3, 40H3.A4, 42E8.H1, 49H11.B1, 51D4, 54C2.A1, 57D7.A1, RS9.F6, or RS9.F10). Exemplary consensus sequences include SEQ ID NOs:320-332. In the consensus sequences of SEQ ID NOs:320-332, the capitalized letter represents an amino acid residue that is absolutely conserved among the aligned sequences (e.g., aligned CDR sequences), while “X” represents an amino acid residue that is not absolutely conserved among the aligned sequences. It will be appreciated that when selecting an amino acid to insert at a position marked by an “X” that in some embodiments, the amino acid is selected from those amino acids found at the corresponding position in the aligned sequences.

[0272] In some embodiments, the antibody comprises a heavy chain CDR1 (CDR-H1) consensus sequence comprising the formula GX₂X₃X₄X₅X₆X₇XX₉X₁₀X₁₁ (I) (SEQ ID NO:320), wherein X₂ is Y or F; X₃ is T, N, or S; X₄ is F, L, or I; X₅ is T, S, or K; X₆ is D, S, or E; X₇ is D or absent; X₈ is H, Y, or T; X₉ is A, N, G, V, W, T, or Y; X₁₀ is M, I, or W; and X₁₁ is H, Q, or N. In some embodiments, the CDR-H1 consensus sequence comprises the sequence GYTFTSYWMH (SEQ ID NO:36), GYTFTSYWIQ (SEQ ID NO:39), GYTFTDHAMH (SEQ ID NO:45), GYTFTSYVMH (SEQ ID NO:51), GYTLSEYTMH (SEQ ID NO:62), GFNIKDTYMH (SEQ ID NO:68), GYSITSDYAWN (SEQ ID NO:74), GYTFTDYNMH (SEQ ID NO:307), or GYTFTDYGMH (SEQ ID NO:315).

[0273] In some embodiments, the amino acids of formula I are further defined as follows: X₂ is Y; X₃ is T or S; X₅ is T or S; X₈ is H or Y; and X₉ is A, N, G, V, W, or T. In some embodiments, X₇ is absent. In some embodiments, X₁₀ is W and X₁₁ is N.

[0274] In some embodiments, the amino acids of formula I are further defined as follows: X₃ is T or N; X₇ is absent; X₁₀ is M or I, and X₁₁ is H or Q.

[0275] In some embodiments, the antibody comprises a CDR-H1 consensus sequence comprising the formula GYX₃X₄X₅X₆X₇XX₉X₁₀X₁₁ (II) (SEQ ID NO:321), wherein X₃ is T or S; X₄ is F, L, or I; X₅ is T or S; X₆ is D, S, or E; X₇ is D or absent; X₈ is H or Y; X₉ is A, N, G, V, W, T, or A; X₁₀ is M, I, or W; and X₁₁ is H, Q, or N.

[0276] In some embodiments, the antibody comprises a CDR-H1 consensus sequence comprising the formula GX₂X₃X₄X₅X₆XX₉X₁₀X₁₁ (III) (SEQ ID NO:322), wherein X₂ is Y or F; X₃ is T or N; X₄ is F, L, or I; X₅ is T, S, or K; X₆ is D, S, or E; X₈ is H, Y, or T; X₉ is A, N, G, V, W, T, Y, or A; X₁₀ is M or I; and X₁₁ is H or Q.

[0277] In some embodiments, the antibody comprises a CDR-H1 consensus sequence comprising the formula GYTX₄X₅X₆XsX₉X₁₀X₁₁ (IV) (SEQ ID NO:323), wherein X₄ is F or L; X₅ is T or S; X₆ is D, S, or E; X₈ is H, Y; X₉ is A, N, G, V, W, T; X₁₀ is M or I; and X₁₁ is H or Q.

[0278] In some embodiments, in the CDR-H1 consensus sequence of any one of formulas I, II, III, or IV, X₄ is F. In some embodiments, in the CDR-H1 consensus sequence of any one of formulas I, II, III, or IV, X₅ is T. In some embodiments, in the CDR-H1 consensus sequence of any one of formulas I, II, III, or IV, X₄ and X₅ are F and T, respectively. In some embodiments, in the CDR-H1 consensus sequence of any one of formulas I, II, III, or IV, X₆ is D or S. In some embodiments, in the CDR-H1 consensus sequence of any one of formulas I, II, III, or IV, X₈ is Y. In some embodiments, in the CDR-H1 consensus sequence of any one of formulas I, II, III, or IV, X₁₀ is M. In some embodiments, in the CDR-H1 consensus sequence of any one of formulas I, II, III, or IV, X₁₁ is H. In some embodiments, in the CDR-H1 consensus sequence of any one of formulas I, II, III, or IV, X₁₀ and X₁₁ are M and H, respectively. In some embodiments, in the CDR-H1 consensus sequence of any one of formulas I, II, III, or IV, X₁₀ and X₁₁ are I and Q, respectively.

[0279] In some embodiments, the antibody comprises a heavy chain CDR2 (CDR-H2) consensus sequence comprising the formula X₁X₂X₃X₄X₅X₆X₇X₈X₉X₁₀YX₁₂X₁₃X₁₄X₁₅X₁₆X₁₇ (V) (SEQ ID NO:324), wherein X₁ is D, V, Y, R, G, or T; X₂ is I, S, or V; X₃ is L, S, N, D, I, or Y; X₄ is P, T, or absent; X₅ is S, Y, N, T, A, G, or F; X₆ is I, S, N, T, or D; X₇ is G or D; X₈ is G, D, N, R, or S; X₉ is R, T, or A; X₁₀ is I, G, S, K, T, N, or R; X₁₂ is G, N, D, or T; X₁₃ is V, Q, E, or P; X₁₄ is K or S; X₁₅ is F, Y or L; X₁₆ is K, R, Q, or is absent; and X₁₇ is G, T, D, S, or is absent. In some embodiments, the CDR-H1 consensus sequence comprises the sequence RSDPTTGGTNYNEKFKT (SEQ ID NO:37), TIYPGDGDARYTQKFKG (SEQ ID NO:40), VISTYSGDTGYNQKFKG (SEQ ID NO:46), YINPYTDGTKYNEKFKG (SEQ ID NO:52), DILPSIGGRIYGVKF (SEQ ID NO:58), GVIPNSGGTSYNQKFRD (SEQ ID NO:63), RIDPANGNTKYDPKFQG (SEQ ID NO:69), YINYSGRTIYNPSLKS (SEQ ID NO:75), YISFSGSTSYNPSLKS (SEQ ID NO:79), YINPNNGGTTYNQKFKG (SEQ ID NO:308), or VISTYNGNTSYNQKYKG (SEQ ID NO:316).

[0280] In some embodiments, the amino acids of formula V are further defined as follows: X₁ is V, Y, R, G, or T; X₃ is S, N, D, I, or Y; X₅ is Y, N, T, A, G, or F; X₆ is S, N, T, or D; X₉ is T or A; X₁₂ is N, D, or T; X₁₃ is Q, E, or P; X₁₆ is K, R, or Q; X₁₇ is G, T, D, or S. In some embodiments, the amino acids of formula V are further defined as follows: X₄ is P or T; X₅ is Y, N, T, A, or G; X₈ is G, D, or N; X₁₀ is G, S, K, T, N, or R; X₁₄ is K; X₁₅ is F or Y; and X₁₇ is G, T, or D.

[0281] In some embodiments, the antibody comprises a CDR-H2 consensus sequence comprising the formula X₁X₂X₃X₄X₅X₆X₇X₈X₉X₁₀YX₁₂X₁₃X₁₄X₁₅X₁₆X₁₇ (VI) (SEQ ID NO:325), wherein X₁ is V, Y, R, G, or T; X₂ is I, S, or V; X₃ is S, N, D, I, or Y; X₄ is P, T, or absent; X₅ is Y, N, T, A, G, or F; X₆ is S, N, T, or D; X₇ is G or D; X₈ is G, D, N, R, or S; X₉ is T, or A; X₁₀ is I, G, S, K, T, N, or R; X₁₂ is N, D, or T; X₁₃ is Q, E, or P; X₁₄ is K or S; X₁₅ is F, Y or L; X₁₆ is K, R, or Q; and X₁₇ is G, T, D, or S.

[0282] In some embodiments, the antibody comprises a CDR-H2 consensus sequence comprising the formula X₁X₂X₃X₄X₅X₆X₇XX₉X₁₁YX₁₂X₁₃KX₁₅X₁₆X₁₇ (VII) (SEQ ID NO:326), wherein X₁ is V, Y, R, G, or T; X₂ is I, S, or V; X₃ is S, N, D, I, or Y; X₄ is P or T; X₅ is Y, N, T, A, or G; X₆ is S, N, T, or D; X₇ is G or D; X₈ is G, D, or N; X₉ is T, or A; X₁₀ is G, S, K, T, N, or R; X₁₂ is N, D, or T; X₁₃ is Q, E, or P; X₁₅ is F or Y; X₁₆ is K, R, or Q; and X₁₇ is G, T, or D.

[0283] In some embodiments, the antibody comprises a heavy chain CDR3 (CDR-H3) consensus sequence comprising the formula ARX₃X₄X₅X₆X₇XX₉X₁₀YAX₁₃DY (VIII) (SEQ ID NO:327), wherein X₃ is G or N; X₄ is D or G; X₅ is D or I; X₆ is S or T; X₇ is Y or T; X₈ is R or A; X₉ is R or G; X₁₀ is G or Y; and X₁₃ is L or M. In some embodiments, the CDR-H3 consensus sequence comprises the sequence ARNGITTAGYYAMDY (SEQ ID NO:41) or ARGDDSYRRGYALDY (SEQ ID NO:64).

[0284] In some embodiments, the antibody comprises a light chain CDR1 (CDR-L1) consensus sequence comprising the formula X₁SSX₄SLX₇XsX₉X₁₀X₁₁X₁₂X₁₃X₁₄X₁₅LX₁₇ (IX) (SEQ ID NO:328), wherein X₁ is R or K; X₄ is Q or K; X₇ is V or L; X₈ is H, D, or Y; X₉ is I, N, or S; X₁₀ is S or absent; X₁₁ is D or N; X₁₂ is G or Q; X₁₃ is N, I, or K; X₁₄ is T or S; X₁₅ is Y or F; and X₁₇ is Q, H, Y, N, or A. In some embodiments, the CDR-L1 consensus sequence comprises the sequence RSSQSLVHNNGNTFLH (SEQ ID NO:11), KSSQSLLDSDGKTYLN (SEQ ID NO:48), RSSQSLVHINGNTYLQ (SEQ ID NO:60), KSSQSLLYSSNQKSYLA (SEQ ID NO:65), RSSKSLLHSNGITYLY (SEQ ID NO:71), or RSSQSLVHINGNTYLH (SEQ ID NO:77).

[0285] In some embodiments, X₄ of formula IX is Q. In some embodiments, X₈ of formula IX is H. In some embodiments, X₉ of formula IX is I or S. In some embodiments, X₁₀ of formula IX is absent. In some embodiments, X₁₁ of formula IX is N. In some embodiments, X₁₂ of formula IX is G. In some embodiments, X₁₃ of formula IX is N or K. In some embodiments, X₁₄ of formula IX is T. In some embodiments, X₁₅ of formula IX is Y.

[0286] In some embodiments, the antibody comprises a CDR-L1 consensus sequence comprising the formula X₁ASX₄X₅IX₇X₈X₉LX₁₁ (X) (SEQ ID NO:329), wherein X₁ is R, K, or S; X₄ is E or Q; X₅ is N, D, or G; X₇ is Y or S; X₈ is S or N; X₉ is N, R, or Y; and X₁₁ is A or N. In some embodiments, the CDR-L1 consensus sequence comprises the sequence RASENIYSNLA (SEQ ID NO:42), KASEDIYNRLA (SEQ ID NO:54), or SASQGISNYLN (SEQ ID NO:311).

[0287] In some embodiments, the antibody comprises a light chain CDR2 (CDR-L2) consensus sequence comprising the formula X₁X₂SX₄X₅X₆S (XI) (SEQ ID NO:330), wherein X₁ is K, Q, Y, V, or L; X₂ is V, M, or T; X₄ is N, K, or Y; X₅ is R or L; and X₆ is F, A, H, or D. In some embodiments, the CDR-L2 consensus sequence comprises the sequence KVSNRFS (SEQ ID NO:38), VVSKLDS (SEQ ID NO:49), QMSNLAS (SEQ ID NO:72), YTSNLHS (SEQ ID NO:312), or LVSYLDS (SEQ ID NO:319).

[0288] In some embodiments, X₂ of formula XI is V. In some embodiments, X₄ of formula XI is N. In some embodiments, X₅ of formula XI is R. In some embodiments, X₅ of formula XI is L.

[0289] In some embodiments, the antibody comprises a light chain CDR3 (CDR-L3) consensus sequence comprising the formula X₁X₂X₃X₄X₅X₆X₇X₈T (XII) (SEQ ID NO:331), wherein X₁ is S, W, or Q; X₂ is Q or H; X₃ is S, T, G, Y, or F; X₄ is T, F, W, or S; X₅ is H, S, G, or N; X₆ is V, A, F, Y, T, or L; X₇ is P, T, or L; and X₈ is Y, F, P, or W. In some embodiments, the CDR-L2 consensus sequence comprises the sequence SQTTHVPPT (SEQ ID NO:13), QHFWGTPYT (SEQ ID NO:44), WQGTHFPYT (SEQ ID NO:50), QQYWSTPWT (SEQ ID NO:56), SQSTHVPYT (SEQ ID NO:61), QQYFSYPPT (SEQ ID NO:67), SQTTHALFT (SEQ ID NO:78), SQSTHVTFT (SEQ ID NO:80), or QQYSNLPYT (SEQ ID NO:313).

[0290] In some embodiments, the amino acids of formula XII are further defined as follows: X₁ is Q; X₃ is Y or F; X₄ is F, W, or S; X₅ is S, G, or N; X₆ is Y, T, or L; X₇ is P; X₈ is P, Y, or W. In some embodiments, X₂ of formula XII is Q. In some embodiments, X₄ of formula XII is T. In some embodiments, X₅ is H. In some embodiments, the amino acids of formula XII are further defined as follows: X₁ is S or W; X₂ is Q; X₃ is S, T, or G; X₄ is T; X₅ is H; X₆ is V, A, or F; X₇ is P, T, or L; and X₈ is Y, F, or P. In some embodiments, X₆ of formula XII is V or F.

[0291] In some embodiments, the antibody comprises a CDR-L3 consensus sequence comprising the formula QX₂X₃X₄X₅X₆PX₈T (XIII) (SEQ ID NO:332), wherein X₂ is Q or H; X₃ is Y or F; X₄ is F, W, or S; X₅ is S, G, or N; X₆ is Y, T, or L; and X₈ is P, Y, or W.

[0292] Variable Region Sequences

[0293] In some embodiments, an anti-TREM2 antibody comprises a heavy chain variable region comprising an amino acid sequence that has at least 90%, 91%, 92%, 93%, 94%, 95%, 96%, 97%, 98%, or 99% sequence identity to the heavy chain variable region of an antibody clone selected from the group consisting of 2G4.B1, 3D3.A1, 7B10.A2, 8A11.B1, 13B11.A1, 14D5.F1, 14H11.A1, 19F10.F3, 21D4.D1, 21D6.G2, 21D11, 22B8.B1, 22G9.D1, 24B4.A1, 26D2.D1, 26D5.A1, 26D11.B1, 26E2.A3, 30A8.A1, 30F2.A2, 38E9.E5, 39H10.A1, 40H3.A4, 42E8.H1, 43E9.H1, 44E2.H1, 44E3.B1, 49H11.B1, 51D4, 52H9.D1, 53H11.D3, 54C2.A1, 55B9.A1, 57D7.A1, 59C6.F1, 60A4.B1, RS9.E2, RS9.F6, RS9.F10, RS11.1F5, RS11.1G6, RS11.1A10, RS11.1D11, RS11.4A5, RS11.4H6, RS11.4D7, RS11.4D9, RS11.4F11, RS12.1C6, RS12.1C10, RS12.2D1, RS12.2D4, RS12.2E1, RS12.2F2, RS12.2G1, RS12.2H1, and RS12.3C10.

[0294] In some embodiments, an anti-TREM2 antibody comprises a light chain variable region comprising an amino acid sequence that has at least 90%, 91%, 92%, 93%, 94%, 95%, 96%, 97%, 98%, or 99% sequence identity to the light chain variable region of an antibody clone selected from the group consisting of 2G4.B1, 3D3.A1, 7B10.A2, 8A11.B1, 13B11.A1, 14D5.F1, 14H11.A1, 19F10.F3, 21D4.D1, 21D6.G2, 21D11, 22B8.B1, 22G9.D1, 24B4.A1, 26D2.D1, 26D5.A1, 26D11.B1, 26E2.A3, 30A8.A1, 30F2.A2, 38E9.E5, 39H10.A1, 40H3.A4, 42E8.H1, 43E9.H1, 44E2.H1, 44E3.B1, 49H11.B1, 51D4, 52H9.D1, 53H11.D3, 54C2.A1, 55B9.A1, 57D7.A1, 59C6.F1, 60A4.B1, RS9.E2, RS9.F6, RS9.F10, RS11.1F5, RS11.1G6, RS11.1A10, RS11.1D11, RS11.4A5, RS11.4H6, RS11.4D7, RS11.4D9, RS11.4F11, RS12.1C6, RS12.1C10, RS12.2D1, RS12.2D4, RS12.2E1, RS12.2F2, RS12.2G1, RS12.2H1, and RS12.3C10.

[0295] In some embodiments, an anti-TREM2 antibody comprises a heavy chain variable region comprising an amino acid sequence that has at least 90%, 91%, 92%, 93%, 94%, 95%, 96%, 97%, 98%, or 99% sequence identity to the heavy chain variable region of an antibody clone selected from the group consisting of 2G4.B1, 3D3.A1, 7B10.A2, 8A11.B1, 13B11.A1, 14D5.F1, 14H11.A1, 19F10.F3, 21D4.D1, 21D6.G2, 21D11, 22B8.B1, 22G9.D1, 24B4.A1, 26D2.D1, 26D5.A1, 26D11.B1, 26E2.A3, 30A8.A1, 30F2.A2, 38E9.E5, 39H10.A1, 40H3.A4, 42E8.H1, 43E9.H1, 44E2.H1, 44E3.B1, 49H11.B1, 51D4, 52H9.D1, 53H11.D3, 54C2.A1, 55B9.A1, 57D7.A1, 59C6.F1, 60A4.B1, RS9.E2, RS9.F6, RS9.F10, RS11.1F5, RS11.1G6, RS11.1A10, RS11.1D11, RS11.4A5, RS11.4H6, RS11.4D7, RS11.4D9, RS11.4F11, RS12.1C6, RS12.1C10, RS12.2D1, RS12.2D4, RS12.2E1, RS12.2F2, RS12.2G1, RS12.2H1, and RS12.3C10 and comprises a light chain variable region comprising an amino acid sequence that has at least 90%, 91%, 92%, 93%, 94%, 95%, 96%, 97%, 98%, or 99% sequence identity to the light chain variable region of an antibody clone selected from the group consisting of 2G4.B1, 3D3.A1, 7B10.A2, 8A11.B1, 13B11.A1, 14D5.F1, 14H11.A1, 19F10.F3, 21D4.D1, 21D6.G2, 21D11, 22B8.B1, 22G9.D1, 24B4.A1, 26D2.D1, 26D5.A1, 26D11.B1, 26E2.A3, 30A8.A1, 30F2.A2, 38E9.E5, 39H10.A1, 40H3.A4, 42E8.H1, 43E9.H1, 44E2.H1, 44E3.B1, 49H11.B1, 51D4, 52H9.D1, 53H11.D3, 54C2.A1, 55B9.A1, 57D7.A1, 59C6.F1, 60A4.B1, RS9.E2, RS9.F6, RS9.F10, RS11.1F5, RS11.1G6, RS11.1A10, RS11.1D11, RS11.4A5, RS11.4H6, RS11.4D7, RS11.4D9, RS11.4F11, RS12.1C6, RS12.1C10, RS12.2D1, RS12.2D4, RS12.2E1, RS12.2F2, RS12.2G1, RS12.2H1, and RS12.3C10.

[0296] In some embodiments, an anti-TREM2 comprises a heavy chain variable region comprising an amino acid sequence that has at least 90% sequence identity (e.g., at least 91%, at least 92%, at least 93%, at least 94%, at least 95%, at least 96%, at least 97%, at least 98%, or at least 99% sequence identity) to any one of SEQ ID NOs:6, 14, 15, 16, 17, 18, 19, 20, 21, 22, 23, 24, 306, or 314. In some embodiments, an anti-TREM2 comprises a heavy chain variable region comprising the amino acid sequence of any one of SEQ ID NOs:6, 14, 15, 16, 17, 18, 19, 20, 21, 22, 23, 24, 306, or 314.

[0297] In some embodiments, an anti-TREM2 comprises a light chain variable region comprising an amino acid sequence that has at least 90% sequence identity (e.g., at least 91%, at least 92%, at least 93%, at least 94%, at least 95%, at least 96%, at least 97%, at least 98%, or at least 99% sequence identity) to any one of SEQ ID NOs:7, 25, 26, 27, 28, 29, 30, 31, 32, 33, 34, 35, 310, or 318. In some embodiments, an anti-TREM2 comprises a light chain variable region comprising the amino acid sequence of any one of SEQ ID NOs:7, 25, 26, 27, 28, 29, 30, 31, 32, 33, 34, 35, 310, or 318.

[0298] CDR and Variable Region Sequences

[0299] In some embodiments, an anti-TREM2 antibody comprises a heavy chain variable region comprising an amino acid sequence that (i) has at least 75%, 80%, 85%, 90%, 91%, 92%, 93%, 94%, 95%, 96%, 97%, 98%, or 99% sequence identity to the heavy chain variable region of an antibody clone selected from the group consisting of 2G4.B1, 3D3.A1, 7B10.A2, 8A11.B1, 13B11.A1, 14D5.F1, 14H11.A1, 19F10.F3, 21D4.D1, 21D6.G2, 21D11, 22B8.B1, 22G9.D1, 24B4.A1, 26D2.D1, 26D5.A1, 26D11.B1, 26E2.A3, 30A8.A1, 30F2.A2, 38E9.E5, 39H10.A1, 40H3.A4, 42E8.H1, 43E9.H1, 44E2.H1, 44E3.B1, 49H11.B1, 51D4, 52H9.D1, 53H11.D3, 54C2.A1, 55B9.A1, 57D7.A1, 59C6.F1, 60A4.B1, RS9.E2, RS9.F6, RS9.F10, RS11.1F5, RS11.1G6, RS11.1A10, RS11.1D11, RS11.4A5, RS11.4H6, RS11.4D7, RS11.4D9, RS11.4F11, RS12.1C6, RS12.1C10, RS12.2D1, RS12.2D4, RS12.2E1, RS12.2F2, RS12.2G1, RS12.2H1, and RS12.3C10 and (ii) comprises a CDR-H1, CDR-H2, and CDR-H3 that is identical to the CDR-H1, CDR-H2, and CDR-H3 of the antibody clone.

[0300] In some embodiments, an anti-TREM2 antibody comprises a light chain variable region comprising an amino acid sequence that (i) has at least 75%, 80%, 85%, 90%, 91%, 92%, 93%, 94%, 95%, 96%, 97%, 98%, or 99% sequence identity to the light chain variable region of an antibody clone selected from the group consisting of 2G4.B1, 3D3.A1, 7B10.A2, 8A11.B1, 13B11.A1, 14D5.F1, 14H11.A1, 19F10.F3, 21D4.D1, 21D6.G2, 21D11, 22B8.B1, 22G9.D1, 24B4.A1, 26D2.D1, 26D5.A1, 26D11.B1, 26E2.A3, 30A8.A1, 30F2.A2, 38E9.E5, 39H10.A1, 40H3.A4, 42E8.H1, 43E9.H1, 44E2.H1, 44E3.B1, 49H11.B1, 51D4, 52H9.D1, 53H11.D3, 54C2.A1, 55B9.A1, 57D7.A1, 59C6.F1, 60A4.B1, RS9.E2, RS9.F6, RS9.F10, RS11.1F5, RS11.1G6, RS11.1A10, RS11.1D11, RS11.4A5, RS11.4H6, RS11.4D7, RS11.4D9, RS11.4F11, RS12.1C6, RS12.1C10, RS12.2D1, RS12.2D4, RS12.2E1, RS12.2F2, RS12.2G1, RS12.2H1, and RS12.3C10 and (ii) comprises a CDR-L1, CDR-L2, and CDR-L3 that is identical to the CDR-L1, CDR-L2, and CDR-L3 of the antibody clone.

[0301] In some embodiments, an anti-TREM2 antibody comprises:
[0302] (a) a heavy chain variable region comprising an amino acid sequence that (i) has at least 75%, 80%, 85%, 90%, 91%, 92%, 93%, 94%, 95%, 96%, 97%, 98%, or 99% sequence identity to the heavy chain variable region of an antibody clone selected from the group consisting of 2G4.B1, 3D3.A1, 7B10.A2, 8A11.B1, 13B11.A1, 14D5.F1, 14H11.A1, 19F10.F3, 21D4.D1, 21D6.G2, 21D11, 22B8.B1, 22G9.D1, 24B4.A1, 26D2.D1, 26D5.A1, 26D11.B1, 26E2.A3, 30A8.A1, 30F2.A2, 38E9.E5, 39H10.A1, 40H3.A4, 42E8.H1, 43E9.H1, 44E2.H1, 44E3.B1, 49H11.B1, 51D4, 52H9.D1, 53H11.D3, 54C2.A1, 55B9.A1, 57D7.A1, 59C6.F1, 60A4.B1, RS9.E2, RS9.F6, RS9.F10, RS11.1F5, RS11.1G6, RS11.1A10, RS11.1D11, RS11.4A5, RS11.4H6, RS11.4D7, RS11.4D9, RS11.4F11, RS12.1C6, RS12.1C10, RS12.2D1, RS12.2D4, RS12.2E1, RS12.2F2, RS12.2G1, RS12.2H1, and RS12.3C10 and (ii) comprises a CDR-H1, CDR-H2, and CDR-H3 that is identical to the CDR-H1, CDR-H2, and CDR-H3 of the antibody clone; and
[0303] (b) a light chain variable region comprising an amino acid sequence that (i) has at least 75%, 80%, 85%, 90%, 91%, 92%, 93%, 94%, 95%, 96%, 97%, 98%, or 99% sequence identity to the light chain variable region of an antibody clone selected from the group consisting of 2G4.B1, 3D3.A1, 7B10.A2, 8A11.B1, 13B11.A1, 14D5.F1, 14H11.A1, 19F10.F3, 21D4.D1, 21D6.G2, 21D11, 22B8.B1, 22G9.D1, 24B4.A1, 26D2.D1, 26D5.A1, 26D11.B1, 26E2.A3, 30A8.A1, 30F2.A2, 38E9.E5, 39H10.A1, 40H3.A4, 42E8.H1, 43E9.H1, 44E2.H1, 44E3.B1, 49H11.B1, 51D4, 52H9.D1, 53H11.D3, 54C2.A1, 55B9.A1, 57D7.A1, 59C6.F1, 60A4.B1, RS9.E2, RS9.F6, RS9.F10, RS11.1F5, RS11.1G6, RS11.1A10, RS11.1D11, RS11.4A5, RS11.4H6, RS11.4D7, RS11.4D9, RS11.4F11, RS12.1C6, RS12.1C10, RS12.2D1, RS12.2D4, RS12.2E1, RS12.2F2, RS12.2G1, RS12.2H1, and RS12.3C10 and (ii) comprises a CDR-L1, CDR-L2, and CDR-L3 that is identical to the CDR-L1, CDR-L2, and CDR-L3 of the antibody clone.

[0304] In some embodiments, an anti-TREM2 antibody is an antibody that competes for binding with an antibody as described herein (e.g., an antibody clone selected from the group consisting of 2G4.B1, 3D3.A1, 7B10.A2, 8A11.B1, 13B11.A1, 14D5.F1, 14H11.A1, 19F10.F3, 21D4.D1, 21D6.G2, 21D11, 22B8.B1, 22G9.D1, 24B4.A1, 26D2.D1, 26D5.A1, 26D11.B1, 26E2.A3, 30A8.A1, 30F2.A2, 38E9.E5, 39H10.A1, 40H3.A4, 42E8.H1, 43E9.H1, 44E2.H1, 44E3.B1, 49H11.B1, 51D4, 52H9.D1, 53H11.D3, 54C2.A1, 55B9.A1, 57D7.A1, 59C6.F1, 60A4.B1, RS9.E2, RS9.F6, RS9.F10, RS11.1F5, RS11.1G6, RS11.1A10, RS11.1D11, RS11.4A5, RS11.4H6, RS11.4D7, RS11.4D9, RS11.4F11, RS12.1C6, RS12.1C10, RS12.2D1, RS12.2D4, RS12.2E1, RS12.2F2, RS12.2G1, RS12.2H1, and RS12.3C10).

[0305] RS9.F6 and RS.F10

[0306] In some embodiments, an anti-TREM2 antibody comprises a heavy chain CDR1 sequence comprising the amino acid sequence of SEQ ID NO:8 or SEQ ID NO:36, a heavy chain CDR2 sequence comprising the amino acid sequence of SEQ ID NO:9 or SEQ ID NO:37, and a heavy chain CDR3 sequence comprising the amino acid sequence of SEQ ID NO:10. In some embodiments, an anti-TREM2 antibody comprises a light chain CDR1 sequence comprising the amino acid sequence of SEQ ID NO:11, a light chain CDR2 sequence comprising the amino acid sequence of SEQ ID NO:12 or SEQ ID NO:38, and a light chain CDR3 sequence comprising the amino acid sequence of SEQ ID NO: 13. In some embodiments, an anti-TREM2 antibody comprises a heavy chain CDR1 sequence comprising the amino acid sequence of SEQ ID NO:8 or SEQ ID NO:36, a heavy chain CDR2 sequence comprising the amino acid sequence of SEQ ID NO:9 or SEQ ID NO:37, a heavy chain CDR3 sequence comprising the amino acid sequence of SEQ ID NO: 10, a light chain CDR1 sequence comprising the amino acid sequence of SEQ ID NO:11, a light chain CDR2 sequence comprising the amino acid sequence of SEQ ID NO:12 or SEQ ID NO:38, and a light chain CDR3 sequence comprising the amino acid sequence of SEQ ID NO:13.

[0307] In some embodiments, an anti-TREM2 antibody comprises a heavy chain CDR1 sequence comprising the amino acid sequence of SEQ ID NO:8, a heavy chain CDR2 sequence comprising the amino acid sequence of SEQ ID NO:9, and a heavy chain CDR3 sequence comprising the amino acid sequence of SEQ ID NO: 10. In some embodiments, an anti-TREM2 antibody comprises a light chain CDR1 sequence comprising the amino acid sequence of SEQ ID NO:11, a light chain CDR2 sequence comprising the amino acid sequence of SEQ ID NO:12, and a light chain CDR3 sequence comprising the amino acid sequence of SEQ ID NO:13. In some embodiments, an anti-TREM2 antibody comprises a heavy chain CDR1-3 and a light chain CDR1-3 comprising the amino acid sequences of SEQ ID NOs:8, 9, 10, 11, 12, and 13, respectively.

[0308] In some embodiments, an anti-TREM2 antibody comprises a heavy chain CDR1 sequence comprising the amino acid sequence of SEQ ID NO:36, a heavy chain CDR2 sequence comprising the amino acid sequence of SEQ ID NO:37, and a heavy chain CDR3 sequence comprising the amino acid sequence of SEQ ID NO: 10. In some embodiments, an anti-TREM2 antibody comprises a light chain CDR1 sequence comprising the amino acid sequence of SEQ ID NO: 11, a light chain CDR2 sequence comprising the amino acid sequence of SEQ ID NO:38, and a light chain CDR3 sequence comprising the amino acid sequence of SEQ ID NO:13. In some embodiments, an anti-TREM2 antibody comprises a heavy chain CDR1-3 and a light chain CDR1-3 comprising the amino acid sequences of SEQ ID NOs:36, 37, 10, 11, 38, and 13, respectively.

[0309] In some embodiments, an anti-TREM2 antibody comprises a heavy chain variable region comprising an amino acid sequence that has at least 90% sequence identity (e.g., at least 91%, 92%, 93%, 94%, 95%, 96%, 97%, 98%, or 99% sequence identity) to SEQ ID NO:6 or SEQ ID NO:24. In some embodiments, an anti-TREM2 antibody comprises a heavy chain variable region comprising the amino acid sequence of SEQ ID NO:6 or SEQ ID NO:24. In some embodiments, an anti-TREM2 antibody comprises a heavy chain variable region comprising an amino acid sequence that has at least 90% sequence identity (e.g., at least 91%, 92%, 93%, 94%, 95%, 96%, 97%, 98%, or 99% sequence identity) to SEQ ID NO:6. In some embodiments, an anti-TREM2 antibody comprises a heavy chain variable region comprising the amino acid sequence of SEQ ID NO:6. In some embodiments, an anti-TREM2 antibody comprises a heavy chain variable region comprising an amino acid sequence that has at least 90% sequence identity (e.g., at least 91%, 92%, 93%, 94%, 95%, 96%, 97%, 98%, or 99% sequence identity) to SEQ ID NO:24. In some embodiments, an anti-TREM2 antibody comprises a heavy chain variable region comprising the amino acid sequence of SEQ ID NO:24.

[0310] In some embodiments, an anti-TREM2 antibody comprises a light chain variable region comprising an amino acid sequence that has at least 90% sequence identity (e.g., at least 91%, 92%, 93%, 94%, 95%, 96%, 97%, 98%, or 99% sequence identity) to SEQ ID NO:7 or SEQ ID NO:35. In some embodiments, an anti-TREM2 antibody comprises a light chain variable region comprising the amino acid sequence of SEQ ID NO:7 or SEQ ID NO:35. In some embodiments, an anti-TREM2 antibody comprises a light chain variable region comprising an amino acid sequence that has at least 90% sequence identity (e.g., at least 91%, 92%, 93%, 94%, 95%, 96%, 97%, 98%, or 99% sequence identity) to SEQ ID NO:7. In some embodiments, an anti-TREM2 antibody comprises a light chain variable region comprising the amino acid sequence of SEQ ID NO:7. In some embodiments, an anti-TREM2 antibody comprises a light chain variable region comprising an amino acid sequence that has at least 90% sequence identity (e.g., at least 91%, 92%, 93%, 94%, 95%, 96%, 97%, 98%, or 99% sequence identity) to SEQ ID NO:35. In some embodiments, an anti-TREM2 antibody comprises a light chain variable region comprising the amino acid sequence of SEQ ID NO:35.

[0311] In some embodiments, an anti-TREM2 antibody comprises a heavy chain variable region comprising an amino acid sequence that has at least 90% sequence identity (e.g., at least 91%, 92%, 93%, 94%, 95%, 96%, 97%, 98%, or 99% sequence identity) to SEQ ID NO:6 and further comprises a light chain variable region comprising an amino acid sequence that has at least 90% sequence identity (e.g., at least 91%, 92%, 93%, 94%, 95%, 96%, 97%, 98%, or 99% sequence identity) to SEQ ID NO:7. In some embodiments, an anti-TREM2 antibody comprises a heavy chain variable region comprising the amino acid sequence of SEQ ID NO:6 and further comprises a light chain variable region comprising the amino acid sequence of SEQ ID NO:7.

[0312] In some embodiments, an anti-TREM2 antibody comprises a heavy chain variable region comprising an amino acid sequence that has at least 90% sequence identity (e.g., at least 91%, 92%, 93%, 94%, 95%, 96%, 97%, 98%, or 99% sequence identity) to SEQ ID NO:24 and further comprises a light chain variable region comprising an amino acid sequence that has at least 90% sequence identity (e.g., at least 91%, 92%, 93%, 94%, 95%, 96%, 97%, 98%, or 99% sequence identity) to SEQ ID NO:35. In some embodiments, an anti-TREM2 antibody comprises a heavy chain variable region comprising the amino acid sequence of SEQ ID NO:24 and further comprises a light chain variable region comprising the amino acid sequence of SEQ ID NO:35.

[0313] In some embodiments, an anti-TREM2 antibody comprises a heavy chain variable region comprising an amino acid sequence that has at least 75% sequence identity (e.g., at least 80%, 85%, 90%, 91%, 92%, 93%, 94%, 95%, 96%, 97%, 98%, or 99% sequence identity to SEQ ID NO:6 and comprises a heavy chain CDR1-3 comprising the amino acid sequences of SEQ ID NOs:8, 9, and 10, respectively.

[0314] In some embodiments, an anti-TREM2 antibody comprises a light chain variable region comprising an amino acid sequence that has at least 75% sequence identity (e.g., at least 80%, 85%, 90%, 91%, 92%, 93%, 94%, 95%, 96%, 97%, 98%, or 99% sequence identity to SEQ ID NO:6 and comprises a light chain CDR1-3 comprising the amino acid sequences of SEQ ID NOs: 11, 12, and 13, respectively.

[0315] In some embodiments, an anti-TREM2 antibody comprises a heavy chain variable region comprising an amino acid sequence that has at least 75% sequence identity (e.g., at least 80%, 85%, 90%, 91%, 92%, 93%, 94%, 95%, 96%, 97%, 98%, or 99% sequence identity to SEQ ID NO:6 and comprises a heavy chain CDR1-3 comprising the amino acid sequences of SEQ ID NOs:8, 9, and 10, respectively, and comprises a light chain variable region comprising an amino acid sequence that has at least 75% sequence identity (e.g., at least 80%, 85%, 90%, 91%, 92%, 93%, 94%, 95%, 96%, 97%, 98%, or 99% sequence identity to SEQ ID NO:6 and comprises a light chain CDR1-3 comprising the amino acid sequences of SEQ ID NOs: 11, 12, and 13, respectively.

[0316] In some embodiments, an anti-TREM2 antibody comprises a heavy chain variable region comprising an amino acid sequence that has at least 75% sequence identity (e.g., at least 80%, 85%, 90%, 91%, 92%, 93%, 94%, 95%, 96%, 97%, 98%, or 99% sequence identity to SEQ ID NO:24 and comprises a heavy chain CDR1-3 comprising the amino acid sequences of SEQ ID NOs:36, 37, and 10, respectively.

[0317] In some embodiments, an anti-TREM2 antibody comprises a light chain variable region comprising an amino acid sequence that has at least 75% sequence identity (e.g., at least 80%, 85%, 90%, 91%, 92%, 93%, 94%, 95%, 96%, 97%, 98%, or 99% sequence identity to SEQ ID NO:35 and comprises a light chain CDR1-3 comprising the amino acid sequences of SEQ ID NOs: 11, 38, and 13, respectively.

[0318] In some embodiments, an anti-TREM2 antibody comprises a heavy chain variable region comprising an amino acid sequence that has at least 75% sequence identity (e.g., at least 80%, 85%, 90%, 91%, 92%, 93%, 94%, 95%, 96%, 97%, 98%, or 99% sequence identity to SEQ ID NO:24 and comprises a heavy chain CDR1-3 comprising the amino acid sequences of SEQ ID NOs:36, 37, and 10, respectively, and comprises a light chain variable region comprising an amino acid sequence that has at least 75% sequence identity (e.g., at least 80%, 85%, 90%, 91%, 92%, 93%, 94%, 95%, 96%, 97%, 98%, or 99% sequence identity to SEQ ID NO:35 and comprises a light chain CDR1-3 comprising the amino acid sequences of SEQ ID NOs: 11, 38, and 13, respectively.

[0319] In some embodiments, an anti-TREM2 antibody is an antibody that competes for binding with an antibody as described herein (e.g., an antibody comprising a heavy chain CDR1-3 and a light chain CDR1-3 comprising the amino acid sequences of SEQ ID NOs:8, 9, 10, 11, 12, and 13, respectively, an antibody comprising a heavy chain variable region comprising the amino acid sequence of SEQ ID NO:6 and further comprising a light chain variable region comprising the amino acid sequence of SEQ ID NO:7, an antibody comprising a heavy chain CDR1-3 and a light chain CDR1-3 comprising the amino acid sequences of SEQ ID NOs:36, 37, 10, 11, 38, and 13, respectively, or an antibody comprising a heavy chain variable region comprising the amino acid sequence of SEQ ID NO:24 and further comprising a light chain variable region comprising the amino acid sequence of SEQ ID NO:35).

[0320] 21D11

[0321] In some embodiments, an anti-TREM2 antibody comprises a heavy chain CDR1 sequence comprising the amino acid sequence of SEQ ID NO:39, a heavy chain CDR2 sequence comprising the amino acid sequence of SEQ ID NO:40, and a heavy chain CDR3 sequence comprising the amino acid sequence of SEQ ID NO:41. In some embodiments, an anti-TREM2 antibody comprises a light chain CDR1 sequence comprising the amino acid sequence of SEQ ID NO:42, a light chain CDR2 sequence comprising the amino acid sequence of SEQ ID NO:43, and a light chain CDR3 sequence comprising the amino acid sequence of SEQ ID NO:44. In some embodiments, an anti-TREM2 antibody comprises a heavy chain CDR1-3 and a light chain CDR1-3 comprising the amino acid sequences of SEQ ID NOs:39, 40, 41, 42, 43, and 44, respectively.

[0322] In some embodiments, an anti-TREM2 antibody comprises a heavy chain variable region comprising an amino acid sequence that has at least 90% sequence identity (e.g., at least 91%, 92%, 93%, 94%, 95%, 96%, 97%, 98%, or 99% sequence identity) to SEQ ID NO:14. In some embodiments, an anti-TREM2 antibody comprises a heavy chain variable region comprising the amino acid sequence of SEQ ID NO: 14.

[0323] In some embodiments, an anti-TREM2 antibody comprises a light chain variable region comprising an amino acid sequence that has at least 90% sequence identity (e.g., at least 91%, 92%, 93%, 94%, 95%, 96%, 97%, 98%, or 99% sequence identity) to SEQ ID NO:25. In some embodiments, an anti-TREM2 antibody comprises a light chain variable region comprising the amino acid sequence of SEQ ID NO:25.

[0324] In some embodiments, an anti-TREM2 antibody comprises a heavy chain variable region comprising an amino acid sequence that has at least 90% sequence identity (e.g., at least 91%, 92%, 93%, 94%, 95%, 96%, 97%, 98%, or 99% sequence identity) to SEQ ID NO:14 and further comprises a light chain variable region comprising an amino acid sequence that has at least 90% sequence identity (e.g., at least 91%, 92%, 93%, 94%, 95%, 96%, 97%, 98%, or 99% sequence identity) to SEQ ID NO:25. In some embodiments, an anti-TREM2 antibody comprises a heavy chain variable region comprising the amino acid sequence of SEQ ID NO: 14 and further comprises a light chain variable region comprising the amino acid sequence of SEQ ID NO:25.

[0325] In some embodiments, an anti-TREM2 antibody comprises a heavy chain variable region comprising an amino acid sequence that has at least 75% sequence identity (e.g., at least 80%, 85%, 90%, 91%, 92%, 93%, 94%, 95%, 96%, 97%, 98%, or 99% sequence identity to SEQ ID NO: 14 and comprises a heavy chain CDR1-3 comprising the amino acid sequences of SEQ ID NOs:39, 40, and 41, respectively.

[0326] In some embodiments, an anti-TREM2 antibody comprises a light chain variable region comprising an amino acid sequence that has at least 75% sequence identity (e.g., at least 80%, 85%, 90%, 91%, 92%, 93%, 94%, 95%, 96%, 97%, 98%, or 99% sequence identity to SEQ ID NO:25 and comprises a light chain CDR1-3 comprising the amino acid sequences of SEQ ID NOs:42, 43, and 44, respectively.

[0327] In some embodiments, an anti-TREM2 antibody comprises a heavy chain variable region comprising an amino acid sequence that has at least 75% sequence identity (e.g., at least 80%, 85%, 90%, 91%, 92%, 93%, 94%, 95%, 96%, 97%, 98%, or 99% sequence identity to SEQ ID NO: 14 and comprises a heavy chain CDR1-3 comprising the amino acid sequences of SEQ ID NOs:39, 40, and 41 respectively, and comprises a light chain variable region comprising an amino acid sequence that has at least 75% sequence identity (e.g., at least 80%, 85%, 90%, 91%, 92%, 93%, 94%, 95%, 96%, 97%, 98%, or 99% sequence identity to SEQ ID NO:25 and comprises a light chain CDR1-3 comprising the amino acid sequences of SEQ ID NOs:42, 43, and 44, respectively.

[0328] In some embodiments, an anti-TREM2 antibody is an antibody that competes for binding with an antibody as described herein (e.g., an antibody comprising a heavy chain CDR1-3 and a light chain CDR1-3 comprising the amino acid sequences of SEQ ID NOs:39, 40, 41, 42, 43, and 44, respectively, or an antibody comprising a heavy chain variable region comprising the amino acid sequence of SEQ ID NO: 14 and further comprising a light chain variable region comprising the amino acid sequence of SEQ ID NO:25). 21D4.D1

[0329] In some embodiments, an anti-TREM2 antibody comprises a heavy chain CDR1 sequence comprising the amino acid sequence of SEQ ID NO:45, a heavy chain CDR2 sequence comprising the amino acid sequence of SEQ ID NO:46, and a heavy chain CDR3 sequence comprising the amino acid sequence of SEQ ID NO:47. In some embodiments, an anti-TREM2 antibody comprises a light chain CDR1 sequence comprising the amino acid sequence of SEQ ID NO:48, a light chain CDR2 sequence comprising the amino acid sequence of SEQ ID NO:49, and a light chain CDR3 sequence comprising the amino acid sequence of SEQ ID NO:50. In some embodiments, an anti-TREM2 antibody comprises a heavy chain CDR1-3 and a light chain CDR1-3 comprising the amino acid sequences of SEQ ID NOs:45, 46, 47, 48, 49, and 50, respectively.

[0330] In some embodiments, an anti-TREM2 antibody comprises a heavy chain variable region comprising an amino acid sequence that has at least 90% sequence identity (e.g., at least 91%, 92%, 93%, 94%, 95%, 96%, 97%, 98%, or 99% sequence identity) to SEQ ID NO:15. In some embodiments, an anti-TREM2 antibody comprises a heavy chain variable region comprising the amino acid sequence of SEQ ID NO:15.

[0331] In some embodiments, an anti-TREM2 antibody comprises a light chain variable region comprising an amino acid sequence that has at least 90% sequence identity (e.g., at least 91%, 92%, 93%, 94%, 95%, 96%, 97%, 98%, or 99% sequence identity) to SEQ ID NO:26. In some embodiments, an anti-TREM2 antibody comprises a light chain variable region comprising the amino acid sequence of SEQ ID NO:26.

[0332] In some embodiments, an anti-TREM2 antibody comprises a heavy chain variable region comprising an amino acid sequence that has at least 90% sequence identity (e.g., at least 91%, 92%, 93%, 94%, 95%, 96%, 97%, 98%, or 99% sequence identity) to SEQ ID NO:15 and further comprises a light chain variable region comprising an amino acid sequence that has at least 90% sequence identity (e.g., at least 91%, 92%, 93%, 94%, 95%, 96%, 97%, 98%, or 99% sequence identity) to SEQ ID NO:26. In some embodiments, an anti-TREM2 antibody comprises a heavy chain variable region comprising the amino acid sequence of SEQ ID NO:15 and further comprises a light chain variable region comprising the amino acid sequence of SEQ ID NO:26.

[0333] In some embodiments, an anti-TREM2 antibody comprises a heavy chain variable region comprising an amino acid sequence that has at least 75% sequence identity (e.g., at least 80%, 85%, 90%, 91%, 92%, 93%, 94%, 95%, 96%, 97%, 98%, or 99% sequence identity to SEQ ID NO:15 and comprises a heavy chain CDR1-3 comprising the amino acid sequences of SEQ ID NOs:45, 46, and 47, respectively.

[0334] In some embodiments, an anti-TREM2 antibody comprises a light chain variable region comprising an amino acid sequence that has at least 75% sequence identity (e.g., at least 80%, 85%, 90%, 91%, 92%, 93%, 94%, 95%, 96%, 97%, 98%, or 99% sequence identity to SEQ ID NO:26 and comprises a light chain CDR1-3 comprising the amino acid sequences of SEQ ID NOs:48, 49, and 50, respectively.

[0335] In some embodiments, an anti-TREM2 antibody comprises a heavy chain variable region comprising an amino acid sequence that has at least 75% sequence identity (e.g., at least 80%, 85%, 90%, 91%, 92%, 93%, 94%, 95%, 96%, 97%, 98%, or 99% sequence identity to SEQ ID NO:15 and comprises a heavy chain CDR1-3 comprising the amino acid sequences of SEQ ID NOs:45, 46, and 47, respectively, and comprises a light chain variable region comprising an amino acid sequence that has at least 75% sequence identity (e.g., at least 80%, 85%, 90%, 91%, 92%, 93%, 94%, 95%, 96%, 97%, 98%, or 99% sequence identity to SEQ ID NO:26 and comprises a light chain CDR1-3 comprising the amino acid sequences of SEQ ID NOs:48, 49, and 50, respectively.

[0336] In some embodiments, an anti-TREM2 antibody is an antibody that competes for binding with an antibody as described herein (e.g., an antibody comprising a heavy chain CDR1-3 and a light chain CDR1-3 comprising the amino acid sequences of SEQ ID NOs:45, 46, 47, 48, 49, and 50, respectively, or an antibody comprising a heavy chain variable region comprising the amino acid sequence of SEQ ID NO:15 and further comprising a light chain variable region comprising the amino acid sequence of SEQ ID NO:26). 26D2

[0337] In some embodiments, an anti-TREM2 antibody comprises a heavy chain CDR1 sequence comprising the amino acid sequence of SEQ ID NO:51, a heavy chain CDR2 sequence comprising the amino acid sequence of SEQ ID NO:52, and a heavy chain CDR3 sequence comprising the amino acid sequence of SEQ ID NO:53. In some embodiments, an anti-TREM2 antibody comprises a light chain CDR1 sequence comprising the amino acid sequence of SEQ ID NO:54, a light chain CDR2 sequence comprising the amino acid sequence of SEQ ID NO:55, and a light chain CDR3 sequence comprising the amino acid sequence of SEQ ID NO:56. In some embodiments, an anti-TREM2 antibody comprises a heavy chain CDR1-3 and a light chain CDR1-3 comprising the amino acid sequences of SEQ ID NOs:51, 52, 53, 54, 55, and 56, respectively.

[0338] In some embodiments, an anti-TREM2 antibody comprises a heavy chain variable region comprising an amino acid sequence that has at least 90% sequence identity (e.g., at least 91%, 92%, 93%, 94%, 95%, 96%, 97%, 98%, or 99% sequence identity) to SEQ ID NO:16. In some embodiments, an anti-TREM2 antibody comprises a heavy chain variable region comprising the amino acid sequence of SEQ ID NO: 16.

[0339] In some embodiments, an anti-TREM2 antibody comprises a light chain variable region comprising an amino acid sequence that has at least 90% sequence identity (e.g., at least 91%, 92%, 93%, 94%, 95%, 96%, 97%, 98%, or 99% sequence identity) to SEQ ID NO:27. In some embodiments, an anti-TREM2 antibody comprises a light chain variable region comprising the amino acid sequence of SEQ ID NO:27.

[0340] In some embodiments, an anti-TREM2 antibody comprises a heavy chain variable region comprising an amino acid sequence that has at least 90% sequence identity (e.g., at least 91%, 92%, 93%, 94%, 95%, 96%, 97%, 98%, or 99% sequence identity) to SEQ ID NO:16 and further comprises a light chain variable region comprising an amino acid sequence that has at least 90% sequence identity (e.g., at least 91%, 92%, 93%, 94%, 95%, 96%, 97%, 98%, or 99% sequence identity) to SEQ ID NO:27. In some embodiments, an anti-TREM2 antibody comprises a heavy chain variable region comprising the amino acid sequence of SEQ ID NO:16 and further comprises a light chain variable region comprising the amino acid sequence of SEQ ID NO:27.

[0341] In some embodiments, an anti-TREM2 antibody comprises a heavy chain variable region comprising an amino acid sequence that has at least 75% sequence identity (e.g., at least 80%, 85%, 90%, 91%, 92%, 93%, 94%, 95%, 96%, 97%, 98%, or 99% sequence identity to SEQ ID NO: 16 and comprises a heavy chain CDR1-3 comprising the amino acid sequences of SEQ ID NOs:51, 52, and 53, respectively.

[0342] In some embodiments, an anti-TREM2 antibody comprises a light chain variable region comprising an amino acid sequence that has at least 75% sequence identity (e.g., at least 80%, 85%, 90%, 91%, 92%, 93%, 94%, 95%, 96%, 97%, 98%, or 99% sequence identity to SEQ ID NO:27 and comprises a light chain CDR1-3 comprising the amino acid sequences of SEQ ID NOs:54, 55, and 56, respectively.

[0343] In some embodiments, an anti-TREM2 antibody comprises a heavy chain variable region comprising an amino acid sequence that has at least 75% sequence identity (e.g., at least 80%, 85%, 90%, 91%, 92%, 93%, 94%, 95%, 96%, 97%, 98%, or 99% sequence identity to SEQ ID NO: 16 and comprises a heavy chain CDR1-3 comprising the amino acid sequences of SEQ ID NOs:51, 52, and 53, respectively, and comprises a light chain variable region comprising an amino acid sequence that has at least 75% sequence identity (e.g., at least 80%, 85%, 90%, 91%, 92%, 93%, 94%, 95%, 96%, 97%, 98%, or 99% sequence identity to SEQ ID NO:27 and comprises a light chain CDR1-3 comprising the amino acid sequences of SEQ ID NOs:54, 55, and 56, respectively.

[0344] In some embodiments, an anti-TREM2 antibody is an antibody that competes for binding with an antibody as described herein (e.g., an antibody comprising a heavy chain CDR1-3 and a light chain CDR1-3 comprising the amino acid sequences of SEQ ID NOs:51, 52, 53, 54, 55, and 56, respectively, or an antibody comprising a heavy chain variable region comprising the amino acid sequence of SEQ ID NO: 16 and further comprising a light chain variable region comprising the amino acid sequence of SEQ ID NO:27).

[0345] 26E2.A3 and 24B4.A1

[0346] In some embodiments, an anti-TREM2 antibody comprises a heavy chain CDR1 sequence comprising the amino acid sequence of SEQ ID NO:57, a heavy chain CDR2 sequence comprising the amino acid sequence of SEQ ID NO:58, and a heavy chain CDR3 sequence comprising the amino acid sequence of SEQ ID NO:59. In some embodiments, an anti-TREM2 antibody comprises a light chain CDR1 sequence comprising the amino acid sequence of SEQ ID NO:60, a light chain CDR2 sequence comprising the amino acid sequence of SEQ ID NO:38, and a light chain CDR3 sequence comprising the amino acid sequence of SEQ ID NO:61. In some embodiments, an anti-TREM2 antibody comprises a heavy chain CDR1-3 and a light chain CDR1-3 comprising the amino acid sequences of SEQ ID NOs:57, 58, 59, 60, 38, and 61, respectively.

[0347] In some embodiments, an anti-TREM2 antibody comprises a heavy chain variable region comprising an amino acid sequence that has at least 90% sequence identity (e.g., at least 91%, 92%, 93%, 94%, 95%, 96%, 97%, 98%, or 99% sequence identity) to SEQ ID NO:17. In some embodiments, an anti-TREM2 antibody comprises a heavy chain variable region comprising the amino acid sequence of SEQ ID NO: 17.

[0348] In some embodiments, an anti-TREM2 antibody comprises a light chain variable region comprising an amino acid sequence that has at least 90% sequence identity (e.g., at least 91%, 92%, 93%, 94%, 95%, 96%, 97%, 98%, or 99% sequence identity) to SEQ ID NO:28. In some embodiments, an anti-TREM2 antibody comprises a light chain variable region comprising the amino acid sequence of SEQ ID NO:28.

[0349] In some embodiments, an anti-TREM2 antibody comprises a heavy chain variable region comprising an amino acid sequence that has at least 90% sequence identity (e.g., at least 91%, 92%, 93%, 94%, 95%, 96%, 97%, 98%, or 99% sequence identity) to SEQ ID NO:17 and further comprises a light chain variable region comprising an amino acid sequence that has at least 90% sequence identity (e.g., at least 91%, 92%, 93%, 94%, 95%, 96%, 97%, 98%, or 99% sequence identity) to SEQ ID NO:28. In some embodiments, an anti-TREM2 antibody comprises a heavy chain variable region comprising the amino acid sequence of SEQ ID NO:17 and further comprises a light chain variable region comprising the amino acid sequence of SEQ ID NO:28.

[0350] In some embodiments, an anti-TREM2 antibody comprises a heavy chain variable region comprising an amino acid sequence that has at least 75% sequence identity (e.g., at least 80%, 85%, 90%, 91%, 92%, 93%, 94%, 95%, 96%, 97%, 98%, or 99% sequence identity to SEQ ID NO: 17 and comprises a heavy chain CDR1-3 comprising the amino acid sequences of SEQ ID NOs:57, 58, and 59, respectively.

[0351] In some embodiments, an anti-TREM2 antibody comprises a light chain variable region comprising an amino acid sequence that has at least 75% sequence identity (e.g., at least 80%, 85%, 90%, 91%, 92%, 93%, 94%, 95%, 96%, 97%, 98%, or 99% sequence identity to SEQ ID NO:28 and comprises a light chain CDR1-3 comprising the amino acid sequences of SEQ ID NOs:60, 38, and 61, respectively.

[0352] In some embodiments, an anti-TREM2 antibody comprises a heavy chain variable region comprising an amino acid sequence that has at least 75% sequence identity (e.g., at least 80%, 85%, 90%, 91%, 92%, 93%, 94%, 95%, 96%, 97%, 98%, or 99% sequence identity to SEQ ID NO: 17 and comprises a heavy chain CDR1-3 comprising the amino acid sequences of SEQ ID NOs:57, 58, and 59, respectively, and comprises a light chain variable region comprising an amino acid sequence that has at least 75% sequence identity (e.g., at least 80%, 85%, 90%, 91%, 92%, 93%, 94%, 95%, 96%, 97%, 98%, or 99% sequence identity to SEQ ID NO:28 and comprises a light chain CDR1-3 comprising the amino acid sequences of SEQ ID NOs:60, 38, and 61, respectively.

[0353] In some embodiments, an anti-TREM2 antibody is an antibody that competes for binding with an antibody as described herein (e.g., an antibody comprising a heavy chain CDR1-3 and a light chain CDR1-3 comprising the amino acid sequences of SEQ ID NOs:57, 58, 59, 60, 38, and 61, respectively, or an antibody comprising a heavy chain variable region comprising the amino acid sequence of SEQ ID NO: 17 and further comprising a light chain variable region comprising the amino acid sequence of SEQ ID NO:28). 3D3.A1

[0354] In some embodiments, an anti-TREM2 antibody comprises a heavy chain CDR1 sequence comprising the amino acid sequence of SEQ ID NO:62, a heavy chain CDR2 sequence comprising the amino acid sequence of SEQ ID NO:63, and a heavy chain CDR3 sequence comprising the amino acid sequence of SEQ ID NO:64. In some embodiments, an anti-TREM2 antibody comprises a light chain CDR1 sequence comprising the amino acid sequence of SEQ ID NO:65, a light chain CDR2 sequence comprising the amino acid sequence of SEQ ID NO:66, and a light chain CDR3 sequence comprising the amino acid sequence of SEQ ID NO:67. In some embodiments, an anti-TREM2 antibody comprises a heavy chain CDR1-3 and a light chain CDR1-3 comprising the amino acid sequences of SEQ ID NOs:62, 63, 64, 65, 66, and 67, respectively.

[0355] In some embodiments, an anti-TREM2 antibody comprises a heavy chain variable region comprising an amino acid sequence that has at least 90% sequence identity (e.g., at least 91%, 92%, 93%, 94%, 95%, 96%, 97%, 98%, or 99% sequence identity) to SEQ ID NO:18. In some embodiments, an anti-TREM2 antibody comprises a heavy chain variable region comprising the amino acid sequence of SEQ ID NO:18.

[0356] In some embodiments, an anti-TREM2 antibody comprises a light chain variable region comprising an amino acid sequence that has at least 90% sequence identity (e.g., at least 91%, 92%, 93%, 94%, 95%, 96%, 97%, 98%, or 99% sequence identity) to SEQ ID NO:29. In some embodiments, an anti-TREM2 antibody comprises a light chain variable region comprising the amino acid sequence of SEQ ID NO:29.

[0357] In some embodiments, an anti-TREM2 antibody comprises a heavy chain variable region comprising an amino acid sequence that has at least 90% sequence identity (e.g., at least 91%, 92%, 93%, 94%, 95%, 96%, 97%, 98%, or 99% sequence identity) to SEQ ID NO:18 and further comprises a light chain variable region comprising an amino acid sequence that has at least 90% sequence identity (e.g., at least 91%, 92%, 93%, 94%, 95%, 96%, 97%, 98%, or 99% sequence identity) to SEQ ID NO:29. In some embodiments, an anti-TREM2 antibody comprises a heavy chain variable region comprising the amino acid sequence of SEQ ID NO:18 and further comprises a light chain variable region comprising the amino acid sequence of SEQ ID NO:29.

[0358] In some embodiments, an anti-TREM2 antibody comprises a heavy chain variable region comprising an amino acid sequence that has at least 75% sequence identity (e.g., at least 80%, 85%, 90%, 91%, 92%, 93%, 94%, 95%, 96%, 97%, 98%, or 99% sequence identity to SEQ ID NO:18 and comprises a heavy chain CDR1-3 comprising the amino acid sequences of SEQ ID NOs:62, 63, and 64, respectively.

[0359] In some embodiments, an anti-TREM2 antibody comprises a light chain variable region comprising an amino acid sequence that has at least 75% sequence identity (e.g., at least 80%, 85%, 90%, 91%, 92%, 93%, 94%, 95%, 96%, 97%, 98%, or 99% sequence identity to SEQ ID NO:29 and comprises a light chain CDR1-3 comprising the amino acid sequences of SEQ ID NOs:65, 66, and 67, respectively.

[0360] In some embodiments, an anti-TREM2 antibody comprises a heavy chain variable region comprising an amino acid sequence that has at least 75% sequence identity (e.g., at least 80%, 85%, 90%, 91%, 92%, 93%, 94%, 95%, 96%, 97%, 98%, or 99% sequence identity to SEQ ID NO:18 and comprises a heavy chain CDR1-3 comprising the amino acid sequences of SEQ ID NOs:62, 63, and 64, respectively, and comprises a light chain variable region comprising an amino acid sequence that has at least 75% sequence identity (e.g., at least 80%, 85%, 90%, 91%, 92%, 93%, 94%, 95%, 96%, 97%, 98%, or 99% sequence identity to SEQ ID NO:29 and comprises a light chain CDR1-3 comprising the amino acid sequences of SEQ ID NOs:65, 66, and 67, respectively.

[0361] In some embodiments, an anti-TREM2 antibody is an antibody that competes for binding with an antibody as described herein (e.g., an antibody comprising a heavy chain CDR1-3 and a light chain CDR1-3 comprising the amino acid sequences of SEQ ID NOs:62, 63, 64, 65, 66, and 67, respectively, or an antibody comprising a heavy chain variable region comprising the amino acid sequence of SEQ ID NO:18 and further comprising a light chain variable region comprising the amino acid sequence of SEQ ID NO:29).

[0362] 40H3.A4

[0363] In some embodiments, an anti-TREM2 antibody comprises a heavy chain CDR1 sequence comprising the amino acid sequence of SEQ ID NO:68, a heavy chain CDR2 sequence comprising the amino acid sequence of SEQ ID NO:69, and a heavy chain CDR3 sequence comprising the amino acid sequence of SEQ ID NO:70. In some embodiments, an anti-TREM2 antibody comprises a light chain CDR1 sequence comprising the amino acid sequence of SEQ ID NO:71, a light chain CDR2 sequence comprising the amino acid sequence of SEQ ID NO:72, and a light chain CDR3 sequence comprising the amino acid sequence of SEQ ID NO:73. In some embodiments, an anti-TREM2 antibody comprises a heavy chain CDR1-3 and a light chain CDR1-3 comprising the amino acid sequences of SEQ ID NOs:68, 69, 70, 71, 72, and 73, respectively.

[0364] In some embodiments, an anti-TREM2 antibody comprises a heavy chain variable region comprising an amino acid sequence that has at least 90% sequence identity (e.g., at least 91%, 92%, 93%, 94%, 95%, 96%, 97%, 98%, or 99% sequence identity) to SEQ ID NO:19. In some embodiments, an anti-TREM2 antibody comprises a heavy chain variable region comprising the amino acid sequence of SEQ ID NO: 19.

[0365] In some embodiments, an anti-TREM2 antibody comprises a light chain variable region comprising an amino acid sequence that has at least 90% sequence identity (e.g., at least 91%, 92%, 93%, 94%, 95%, 96%, 97%, 98%, or 99% sequence identity) to SEQ ID NO:30. In some embodiments, an anti-TREM2 antibody comprises a light chain variable region comprising the amino acid sequence of SEQ ID NO:30.

[0366] In some embodiments, an anti-TREM2 antibody comprises a heavy chain variable region comprising an amino acid sequence that has at least 90% sequence identity (e.g., at least 91%, 92%, 93%, 94%, 95%, 96%, 97%, 98%, or 99% sequence identity) to SEQ ID NO:19 and further comprises a light chain variable region comprising an amino acid sequence that has at least 90% sequence identity (e.g., at least 91%, 92%, 93%, 94%, 95%, 96%, 97%, 98%, or 99% sequence identity) to SEQ ID NO:30. In some embodiments, an anti-TREM2 antibody comprises a heavy chain variable region comprising the amino acid sequence of SEQ ID NO:19 and further comprises a light chain variable region comprising the amino acid sequence of SEQ ID NO:30.

[0367] In some embodiments, an anti-TREM2 antibody comprises a heavy chain variable region comprising an amino acid sequence that has at least 75% sequence identity (e.g., at least 80%, 85%, 90%, 91%, 92%, 93%, 94%, 95%, 96%, 97%, 98%, or 99% sequence identity to SEQ ID NO:19 and comprises a heavy chain CDR1-3 comprising the amino acid sequences of SEQ ID NOs:68, 69, and 70, respectively.

[0368] In some embodiments, an anti-TREM2 antibody comprises a light chain variable region comprising an amino acid sequence that has at least 75% sequence identity (e.g., at least 80%, 85%, 90%, 91%, 92%, 93%, 94%, 95%, 96%, 97%, 98%, or 99% sequence identity to SEQ ID NO:30 and comprises a light chain CDR1-3 comprising the amino acid sequences of SEQ ID NOs:71, 72, and 73, respectively.

[0369] In some embodiments, an anti-TREM2 antibody comprises a heavy chain variable region comprising an amino acid sequence that has at least 75% sequence identity (e.g., at least 80%, 85%, 90%, 91%, 92%, 93%, 94%, 95%, 96%, 97%, 98%, or 99% sequence identity to SEQ ID NO:19 and comprises a heavy chain CDR1-3 comprising the amino acid sequences of SEQ ID NOs:68, 69, and 70, respectively, and comprises a light chain variable region comprising an amino acid sequence that has at least 75% sequence identity (e.g., at least 80%, 85%, 90%, 91%, 92%, 93%, 94%, 95%, 96%, 97%, 98%, or 99% sequence identity to SEQ ID NO:30 and comprises a light chain CDR1-3 comprising the amino acid sequences of SEQ ID NOs:71, 72, and 73, respectively.

[0370] In some embodiments, an anti-TREM2 antibody is an antibody that competes for binding with an antibody as described herein (e.g., an antibody comprising a heavy chain CDR1-3 and a light chain CDR1-3 comprising the amino acid sequences of SEQ ID NOs:68, 69, 70, 71, 72, and 73, respectively, or an antibody comprising a heavy chain variable region comprising the amino acid sequence of SEQ ID NO: 19 and further comprising a light chain variable region comprising the amino acid sequence of SEQ ID NO:30). 42E8.H1

[0371] In some embodiments, an anti-TREM2 antibody comprises a heavy chain CDR1 sequence comprising the amino acid sequence of SEQ ID NO:74, a heavy chain CDR2 sequence comprising the amino acid sequence of SEQ ID NO:75, and a heavy chain CDR3 sequence comprising the amino acid sequence of SEQ ID NO:76. In some embodiments, an anti-TREM2 antibody comprises a light chain CDR1 sequence comprising the amino acid sequence of SEQ ID NO:77, a light chain CDR2 sequence comprising the amino acid sequence of SEQ ID NO:38, and a light chain CDR3 sequence comprising the amino acid sequence of SEQ ID NO:78. In some embodiments, an anti-TREM2 antibody comprises a heavy chain CDR1-3 and a light chain CDR1-3 comprising the amino acid sequences of SEQ ID NOs:74, 75, 76, 77, 38, and 78, respectively.

[0372] In some embodiments, an anti-TREM2 antibody comprises a heavy chain variable region comprising an amino acid sequence that has at least 90% sequence identity (e.g., at least 91%, 92%, 93%, 94%, 95%, 96%, 97%, 98%, or 99% sequence identity) to SEQ ID NO:20. In some embodiments, an anti-TREM2 antibody comprises a heavy chain variable region comprising the amino acid sequence of SEQ ID NO:20.

[0373] In some embodiments, an anti-TREM2 antibody comprises a light chain variable region comprising an amino acid sequence that has at least 90% sequence identity (e.g., at least 91%, 92%, 93%, 94%, 95%, 96%, 97%, 98%, or 99% sequence identity) to SEQ ID NO:31. In some embodiments, an anti-TREM2 antibody comprises a light chain variable region comprising the amino acid sequence of SEQ ID NO:31.

[0374] In some embodiments, an anti-TREM2 antibody comprises a heavy chain variable region comprising an amino acid sequence that has at least 90% sequence identity (e.g., at least 91%, 92%, 93%, 94%, 95%, 96%, 97%, 98%, or 99% sequence identity) to SEQ ID NO:20 and further comprises a light chain variable region comprising an amino acid sequence that has at least 90% sequence identity (e.g., at least 91%, 92%, 93%, 94%, 95%, 96%, 97%, 98%, or 99% sequence identity) to SEQ ID NO:31. In some embodiments, an anti-TREM2 antibody comprises a heavy chain variable region comprising the amino acid sequence of SEQ ID NO:20 and further comprises a light chain variable region comprising the amino acid sequence of SEQ ID NO:31.

[0375] In some embodiments, an anti-TREM2 antibody comprises a heavy chain variable region comprising an amino acid sequence that has at least 75% sequence identity (e.g., at least 80%, 85%, 90%, 91%, 92%, 93%, 94%, 95%, 96%, 97%, 98%, or 99% sequence identity to SEQ ID NO:20 and comprises a heavy chain CDR1-3 comprising the amino acid sequences of SEQ ID NOs:74, 75, and 76, respectively.

[0376] In some embodiments, an anti-TREM2 antibody comprises a light chain variable region comprising an amino acid sequence that has at least 75% sequence identity (e.g., at least 80%, 85%, 90%, 91%, 92%, 93%, 94%, 95%, 96%, 97%, 98%, or 99% sequence identity to SEQ ID NO:31 and comprises a light chain CDR1-3 comprising the amino acid sequences of SEQ ID NOs:77, 38, and 78, respectively.

[0377] In some embodiments, an anti-TREM2 antibody comprises a heavy chain variable region comprising an amino acid sequence that has at least 75% sequence identity (e.g., at least 80%, 85%, 90%, 91%, 92%, 93%, 94%, 95%, 96%, 97%, 98%, or 99% sequence identity to SEQ ID NO:20 and comprises a heavy chain CDR1-3 comprising the amino acid sequences of SEQ ID NOs:74, 75, and 76, respectively, and comprises a light chain variable region comprising an amino acid sequence that has at least 75% sequence identity (e.g., at least 80%, 85%, 90%, 91%, 92%, 93%, 94%, 95%, 96%, 97%, 98%, or 99% sequence identity to SEQ ID NO:31 and comprises a light chain CDR1-3 comprising the amino acid sequences of SEQ ID NOs:77, 38, and 78, respectively.

[0378] In some embodiments, an anti-TREM2 antibody is an antibody that competes for binding with an antibody as described herein (e.g., an antibody comprising a heavy chain CDR1-3 and a light chain CDR1-3 comprising the amino acid sequences of SEQ ID NOs:74, 75, 76, 77, 38, and 78, respectively, or an antibody comprising a heavy chain variable region comprising the amino acid sequence of SEQ ID NO:20 and further comprising a light chain variable region comprising the amino acid sequence of SEQ ID NO:31).

[0379] 49H11.B1

[0380] In some embodiments, an anti-TREM2 antibody comprises a heavy chain CDR1 sequence comprising the amino acid sequence of SEQ ID NO:74, a heavy chain CDR2 sequence comprising the amino acid sequence of SEQ ID NO:79, and a heavy chain CDR3 sequence comprising the amino acid sequence of SEQ ID NO:76. In some embodiments, an anti-TREM2 antibody comprises a light chain CDR1 sequence comprising the amino acid sequence of SEQ ID NO:77, a light chain CDR2 sequence comprising the amino acid sequence of SEQ ID NO:38, and a light chain CDR3 sequence comprising the amino acid sequence of SEQ ID NO:80. In some embodiments, an anti-TREM2 antibody comprises a heavy chain CDR1-3 and a light chain CDR1-3 comprising the amino acid sequences of SEQ ID NOs:74, 79, 76, 77, 38, and 80, respectively.

[0381] In some embodiments, an anti-TREM2 antibody comprises a heavy chain variable region comprising an amino acid sequence that has at least 90% sequence identity (e.g., at least 91%, 92%, 93%, 94%, 95%, 96%, 97%, 98%, or 99% sequence identity) to SEQ ID NO:21. In some embodiments, an anti-TREM2 antibody comprises a heavy chain variable region comprising the amino acid sequence of SEQ ID NO:21.

[0382] In some embodiments, an anti-TREM2 antibody comprises a light chain variable region comprising an amino acid sequence that has at least 90% sequence identity (e.g., at least 91%, 92%, 93%, 94%, 95%, 96%, 97%, 98%, or 99% sequence identity) to SEQ ID NO:32. In some embodiments, an anti-TREM2 antibody comprises a light chain variable region comprising the amino acid sequence of SEQ ID NO:32.

[0383] In some embodiments, an anti-TREM2 antibody comprises a heavy chain variable region comprising an amino acid sequence that has at least 90% sequence identity (e.g., at least 91%, 92%, 93%, 94%, 95%, 96%, 97%, 98%, or 99% sequence identity) to SEQ ID NO:21 and further comprises a light chain variable region comprising an amino acid sequence that has at least 90% sequence identity (e.g., at least 91%, 92%, 93%, 94%, 95%, 96%, 97%, 98%, or 99% sequence identity) to SEQ ID NO:32. In some embodiments, an anti-TREM2 antibody comprises a heavy chain variable region comprising the amino acid sequence of SEQ ID NO:21 and further comprises a light chain variable region comprising the amino acid sequence of SEQ ID NO:32.

[0384] In some embodiments, an anti-TREM2 antibody comprises a heavy chain variable region comprising an amino acid sequence that has at least 75% sequence identity (e.g., at least 80%, 85%, 90%, 91%, 92%, 93%, 94%, 95%, 96%, 97%, 98%, or 99% sequence identity to SEQ ID NO:21 and comprises a heavy chain CDR1-3 comprising the amino acid sequences of SEQ ID NOs:74, 79, and 76, respectively.

[0385] In some embodiments, an anti-TREM2 antibody comprises a light chain variable region comprising an amino acid sequence that has at least 75% sequence identity (e.g., at least 80%, 85%, 90%, 91%, 92%, 93%, 94%, 95%, 96%, 97%, 98%, or 99% sequence identity to SEQ ID NO:32 and comprises a light chain CDR1-3 comprising the amino acid sequences of SEQ ID NOs:77, 38, and 80, respectively.

[0386] In some embodiments, an anti-TREM2 antibody comprises a heavy chain variable region comprising an amino acid sequence that has at least 75% sequence identity (e.g., at least 80%, 85%, 90%, 91%, 92%, 93%, 94%, 95%, 96%, 97%, 98%, or 99% sequence identity to SEQ ID NO:21 and comprises a heavy chain CDR1-3 comprising the amino acid sequences of SEQ ID NOs:74, 79, and 76, respectively, and comprises a light chain variable region comprising an amino acid sequence that has at least 75% sequence identity (e.g., at least 80%, 85%, 90%, 91%, 92%, 93%, 94%, 95%, 96%, 97%, 98%, or 99% sequence identity to SEQ ID NO:32 and comprises a light chain CDR1-3 comprising the amino acid sequences of SEQ ID NOs:77, 38, and 80, respectively.

[0387] In some embodiments, an anti-TREM2 antibody is an antibody that competes for binding with an antibody as described herein (e.g., an antibody comprising a heavy chain CDR1-3 and a light chain CDR1-3 comprising the amino acid sequences of SEQ ID NOs:74, 79, 76, 77, 38, and 80, respectively, or an antibody comprising a heavy chain variable region comprising the amino acid sequence of SEQ ID NO:21 and further comprising a light chain variable region comprising the amino acid sequence of SEQ ID NO:32).

[0388] 54C2.A1

[0389] In some embodiments, an anti-TREM2 antibody comprises a heavy chain CDR1 sequence comprising the amino acid sequence of SEQ ID NO:81, a heavy chain CDR2 sequence comprising the amino acid sequence of SEQ ID NO:82, and a heavy chain CDR3 sequence comprising the amino acid sequence of SEQ ID NO:83. In some embodiments, an anti-TREM2 antibody comprises a light chain CDR1 sequence comprising the amino acid sequence of SEQ ID NO:60, a light chain CDR2 sequence comprising the amino acid sequence of SEQ ID NO:38, and a light chain CDR3 sequence comprising the amino acid sequence of SEQ ID NO:84. In some embodiments, an anti-TREM2 antibody comprises a heavy chain CDR1-3 and a light chain CDR1-3 comprising the amino acid sequences of SEQ ID NOs:81, 82, 83, 60, 38, and 84, respectively.

[0390] In some embodiments, an anti-TREM2 antibody comprises a heavy chain variable region comprising an amino acid sequence that has at least 90% sequence identity (e.g., at least 91%, 92%, 93%, 94%, 95%, 96%, 97%, 98%, or 99% sequence identity) to SEQ ID NO:22. In some embodiments, an anti-TREM2 antibody comprises a heavy chain variable region comprising the amino acid sequence of SEQ ID NO:22.

[0391] In some embodiments, an anti-TREM2 antibody comprises a light chain variable region comprising an amino acid sequence that has at least 90% sequence identity (e.g., at least 91%, 92%, 93%, 94%, 95%, 96%, 97%, 98%, or 99% sequence identity) to SEQ ID NO:33. In some embodiments, an anti-TREM2 antibody comprises a light chain variable region comprising the amino acid sequence of SEQ ID NO:33.

[0392] In some embodiments, an anti-TREM2 antibody comprises a heavy chain variable region comprising an amino acid sequence that has at least 90% sequence identity (e.g., at least 91%, 92%, 93%, 94%, 95%, 96%, 97%, 98%, or 99% sequence identity) to SEQ ID NO:22 and further comprises a light chain variable region comprising an amino acid sequence that has at least 90% sequence identity (e.g., at least 91%, 92%, 93%, 94%, 95%, 96%, 97%, 98%, or 99% sequence identity) to SEQ ID NO:33. In some embodiments, an anti-TREM2 antibody comprises a heavy chain variable region comprising the amino acid sequence of SEQ ID NO:22 and further comprises a light chain variable region comprising the amino acid sequence of SEQ ID NO:33.

[0393] In some embodiments, an anti-TREM2 antibody comprises a heavy chain variable region comprising an amino acid sequence that has at least 75% sequence identity (e.g., at least 80%, 85%, 90%, 91%, 92%, 93%, 94%, 95%, 96%, 97%, 98%, or 99% sequence identity to SEQ ID NO:22 and comprises a heavy chain CDR1-3 comprising the amino acid sequences of SEQ ID NOs:81, 82, and 83, respectively.

[0394] In some embodiments, an anti-TREM2 antibody comprises a light chain variable region comprising an amino acid sequence that has at least 75% sequence identity (e.g., at least 80%, 85%, 90%, 91%, 92%, 93%, 94%, 95%, 96%, 97%, 98%, or 99% sequence identity to SEQ ID NO:33 and comprises a light chain CDR1-3 comprising the amino acid sequences of SEQ ID NOs:60, 38, and 84, respectively.

[0395] In some embodiments, an anti-TREM2 antibody comprises a heavy chain variable region comprising an amino acid sequence that has at least 75% sequence identity (e.g., at least 80%, 85%, 90%, 91%, 92%, 93%, 94%, 95%, 96%, 97%, 98%, or 99% sequence identity to SEQ ID NO:22 and comprises a heavy chain CDR1-3 comprising the amino acid sequences of SEQ ID NOs:81, 82, and 83, respectively, and comprises a light chain variable region comprising an amino acid sequence that has at least 75% sequence identity (e.g., at least 80%, 85%, 90%, 91%, 92%, 93%, 94%, 95%, 96%, 97%, 98%, or 99% sequence identity to SEQ ID NO:33 and comprises a light chain CDR1-3 comprising the amino acid sequences of SEQ ID NOs:60, 38, and 84, respectively.

[0396] In some embodiments, an anti-TREM2 antibody is an antibody that competes for binding with an antibody as described herein (e.g., an antibody comprising a heavy chain CDR1-3 and a light chain CDR1-3 comprising the amino acid sequences of SEQ ID NOs:81, 82, 83, 60, 38, and 84, respectively, or an antibody comprising a heavy chain variable region comprising the amino acid sequence of SEQ ID NO:22 and further comprising a light chain variable region comprising the amino acid sequence of SEQ ID NO:33).

[0397] 57D7.A1

[0398] In some embodiments, an anti-TREM2 antibody comprises a heavy chain CDR1 sequence comprising the amino acid sequence of SEQ ID NO:85, a heavy chain CDR2 sequence comprising the amino acid sequence of SEQ ID NO:86, and a heavy chain CDR3 sequence comprising the amino acid sequence of SEQ ID NO:87. In some embodiments, an anti-TREM2 antibody comprises a light chain CDR1 sequence comprising the amino acid sequence of SEQ ID NO:88, a light chain CDR2 sequence comprising the amino acid sequence of SEQ ID NO:38, and a light chain CDR3 sequence comprising the amino acid sequence of SEQ ID NO:89. In some embodiments, an anti-TREM2 antibody comprises a heavy chain CDR1-3 and a light chain CDR1-3 comprising the amino acid sequences of SEQ ID NOs:85, 86, 87, 88, 38, and 89, respectively.

[0399] In some embodiments, an anti-TREM2 antibody comprises a heavy chain variable region comprising an amino acid sequence that has at least 90% sequence identity (e.g., at least 91%, 92%, 93%, 94%, 95%, 96%, 97%, 98%, or 99% sequence identity) to SEQ ID NO:23. In some embodiments, an anti-TREM2 antibody comprises a heavy chain variable region comprising the amino acid sequence of SEQ ID NO:23.

[0400] In some embodiments, an anti-TREM2 antibody comprises a light chain variable region comprising an amino acid sequence that has at least 90% sequence identity (e.g., at least 91%, 92%, 93%, 94%, 95%, 96%, 97%, 98%, or 99% sequence identity) to SEQ ID NO:34. In some embodiments, an anti-TREM2 antibody comprises a light chain variable region comprising the amino acid sequence of SEQ ID NO:34.

[0401] In some embodiments, an anti-TREM2 antibody comprises a heavy chain variable region comprising an amino acid sequence that has at least 90% sequence identity (e.g., at least 91%, 92%, 93%, 94%, 95%, 96%, 97%, 98%, or 99% sequence identity) to SEQ ID NO:23 and further comprises a light chain variable region comprising an amino acid sequence that has at least 90% sequence identity (e.g., at least 91%, 92%, 93%, 94%, 95%, 96%, 97%, 98%, or 99% sequence identity) to SEQ ID NO:34. In some embodiments, an anti-TREM2 antibody comprises a heavy chain variable region comprising the amino acid sequence of SEQ ID NO:23 and further comprises a light chain variable region comprising the amino acid sequence of SEQ ID NO:34.

[0402] In some embodiments, an anti-TREM2 antibody comprises a heavy chain variable region comprising an amino acid sequence that has at least 75% sequence identity (e.g., at least 80%, 85%, 90%, 91%, 92%, 93%, 94%, 95%, 96%, 97%, 98%, or 99% sequence identity to SEQ ID NO:23 and comprises a heavy chain CDR1-3 comprising the amino acid sequences of SEQ ID NOs:85, 86, and 87, respectively.

[0403] In some embodiments, an anti-TREM2 antibody comprises a light chain variable region comprising an amino acid sequence that has at least 75% sequence identity (e.g., at least 80%, 85%, 90%, 91%, 92%, 93%, 94%, 95%, 96%, 97%, 98%, or 99% sequence identity to SEQ ID NO:34 and comprises a light chain CDR1-3 comprising the amino acid sequences of SEQ ID NOs:88, 38, and 89, respectively.

[0404] In some embodiments, an anti-TREM2 antibody comprises a heavy chain variable region comprising an amino acid sequence that has at least 75% sequence identity (e.g., at least 80%, 85%, 90%, 91%, 92%, 93%, 94%, 95%, 96%, 97%, 98%, or 99% sequence identity to SEQ ID NO:23 and comprises a heavy chain CDR1-3 comprising the amino acid sequences of SEQ ID NOs:85, 86, and 87, respectively, and comprises a light chain variable region comprising an amino acid sequence that has at least 75% sequence identity (e.g., at least 80%, 85%, 90%, 91%, 92%, 93%, 94%, 95%, 96%, 97%, 98%, or 99% sequence identity to SEQ ID NO:34 and comprises a light chain CDR1-3 comprising the amino acid sequences of SEQ ID NOs:88, 38, and 89, respectively.

[0405] In some embodiments, an anti-TREM2 antibody is an antibody that competes for binding with an antibody as described herein (e.g., an antibody comprising a heavy chain CDR1-3 and a light chain CDR1-3 comprising the amino acid sequences of SEQ ID NOs:85, 86, 87, 88, 38, and 89, respectively, or an antibody comprising a heavy chain variable region comprising the amino acid sequence of SEQ ID NO:23 and further comprising a light chain variable region comprising the amino acid sequence of SEQ ID NO:34). 7B10.A2

[0406] In some embodiments, an anti-TREM2 antibody comprises a heavy chain CDR1 sequence comprising the amino acid sequence of SEQ ID NO:307, a heavy chain CDR2 sequence comprising the amino acid sequence of SEQ ID NO:308, and a heavy chain CDR3 sequence comprising the amino acid sequence of SEQ ID NO:309. In some embodiments, an anti-TREM2 antibody comprises a light chain CDR1 sequence comprising the amino acid sequence of SEQ ID NO:311, a light chain CDR2 sequence comprising the amino acid sequence of SEQ ID NO:312, and a light chain CDR3 sequence comprising the amino acid sequence of SEQ ID NO:313. In some embodiments, an anti-TREM2 antibody comprises a heavy chain CDR1-3 and a light chain CDR1-3 comprising the amino acid sequences of SEQ ID NOs:307, 308, 309, 311, 312, and 313, respectively.

[0407] In some embodiments, an anti-TREM2 antibody comprises a heavy chain variable region comprising an amino acid sequence that has at least 90% sequence identity (e.g., at least 91%, 92%, 93%, 94%, 95%, 96%, 97%, 98%, or 99% sequence identity) to SEQ ID NO:306. In some embodiments, an anti-TREM2 antibody comprises a heavy chain variable region comprising the amino acid sequence of SEQ ID NO:306.

[0408] In some embodiments, an anti-TREM2 antibody comprises a light chain variable region comprising an amino acid sequence that has at least 90% sequence identity (e.g., at least 91%, 92%, 93%, 94%, 95%, 96%, 97%, 98%, or 99% sequence identity) to SEQ ID NO:310. In some embodiments, an anti-TREM2 antibody comprises a light chain variable region comprising the amino acid sequence of SEQ ID NO:310.

[0409] In some embodiments, an anti-TREM2 antibody comprises a heavy chain variable region comprising an amino acid sequence that has at least 90% sequence identity (e.g., at least 91%, 92%, 93%, 94%, 95%, 96%, 97%, 98%, or 99% sequence identity) to SEQ ID NO:306 and further comprises a light chain variable region comprising an amino acid sequence that has at least 90% sequence identity (e.g., at least 91%, 92%, 93%, 94%, 95%, 96%, 97%, 98%, or 99% sequence identity) to SEQ ID NO:310. In some embodiments, an anti-TREM2 antibody comprises a heavy chain variable region comprising the amino acid sequence of SEQ ID NO:306 and further comprises a light chain variable region comprising the amino acid sequence of SEQ ID NO:310.

[0410] In some embodiments, an anti-TREM2 antibody comprises a heavy chain variable region comprising an amino acid sequence that has at least 75% sequence identity (e.g., at least 80%, 85%, 90%, 91%, 92%, 93%, 94%, 95%, 96%, 97%, 98%, or 99% sequence identity to SEQ ID NO:306 and comprises a heavy chain CDR1-3 comprising the amino acid sequences of SEQ ID NOs:307, 308, and 309, respectively.

[0411] In some embodiments, an anti-TREM2 antibody comprises a light chain variable region comprising an amino acid sequence that has at least 75% sequence identity (e.g., at least 80%, 85%, 90%, 91%, 92%, 93%, 94%, 95%, 96%, 97%, 98%, or 99% sequence identity to SEQ ID NO:310 and comprises a light chain CDR1-3 comprising the amino acid sequences of SEQ ID NOs:311, 312, and 313, respectively.

[0412] In some embodiments, an anti-TREM2 antibody comprises a heavy chain variable region comprising an amino acid sequence that has at least 75% sequence identity (e.g., at least 80%, 85%, 90%, 91%, 92%, 93%, 94%, 95%, 96%, 97%, 98%, or 99% sequence identity to SEQ ID NO:306 and comprises a heavy chain CDR1-3 comprising the amino acid sequences of SEQ ID NOs:307, 308, and 309, respectively, and comprises a light chain variable region comprising an amino acid sequence that has at least 75% sequence identity (e.g., at least 80%, 85%, 90%, 91%, 92%, 93%, 94%, 95%, 96%, 97%, 98%, or 99% sequence identity to SEQ ID NO:310 and comprises a light chain CDR1-3 comprising the amino acid sequences of SEQ ID NOs:311, 312, and 313, respectively.

[0413] In some embodiments, an anti-TREM2 antibody is an antibody that competes for binding with an antibody as described herein (e.g., an antibody comprising a heavy chain CDR1-3 and a light chain CDR1-3 comprising the amino acid sequences of SEQ ID NOs:307, 308, 309, 311, 312, and 313, respectively, or an antibody comprising a heavy chain variable region comprising the amino acid sequence of SEQ ID NO:306 and further comprising a light chain variable region comprising the amino acid sequence of SEQ ID NO:310). 51D4

[0414] In some embodiments, an anti-TREM2 antibody comprises a heavy chain CDR1 sequence comprising the amino acid sequence of SEQ ID NO:315, a heavy chain CDR2 sequence comprising the amino acid sequence of SEQ ID NO:316, and a heavy chain CDR3 sequence comprising the amino acid sequence of SEQ ID NO:317. In some embodiments, an anti-TREM2 antibody comprises a light chain CDR1 sequence comprising the amino acid sequence of SEQ ID NO:48, a light chain CDR2 sequence comprising the amino acid sequence of SEQ ID NO:319, and a light chain CDR3 sequence comprising the amino acid sequence of SEQ ID NO:50. In some embodiments, an anti-TREM2 antibody comprises a heavy chain CDR1-3 and a light chain CDR1-3 comprising the amino acid sequences of SEQ ID NOs:315, 316, 317, 48, 319, and 50, respectively.

[0415] In some embodiments, an anti-TREM2 antibody comprises a heavy chain variable region comprising an amino acid sequence that has at least 90% sequence identity (e.g., at least 91%, 92%, 93%, 94%, 95%, 96%, 97%, 98%, or 99% sequence identity) to SEQ ID NO:314. In some embodiments, an anti-TREM2 antibody comprises a heavy chain variable region comprising the amino acid sequence of SEQ ID NO:314.

[0416] In some embodiments, an anti-TREM2 antibody comprises a light chain variable region comprising an amino acid sequence that has at least 90% sequence identity (e.g., at least 91%, 92%, 93%, 94%, 95%, 96%, 97%, 98%, or 99% sequence identity) to SEQ ID NO:318. In some embodiments, an anti-TREM2 antibody comprises a light chain variable region comprising the amino acid sequence of SEQ ID NO:318.

[0417] In some embodiments, an anti-TREM2 antibody comprises a heavy chain variable region comprising an amino acid sequence that has at least 90% sequence identity (e.g., at least 91%, 92%, 93%, 94%, 95%, 96%, 97%, 98%, or 99% sequence identity) to SEQ ID NO:314 and further comprises a light chain variable region comprising an amino acid sequence that has at least 90% sequence identity (e.g., at least 91%, 92%, 93%, 94%, 95%, 96%, 97%, 98%, or 99% sequence identity) to SEQ ID NO:318. In some embodiments, an anti-TREM2 antibody comprises a heavy chain variable region comprising the amino acid sequence of SEQ ID NO:314 and further comprises a light chain variable region comprising the amino acid sequence of SEQ ID NO:318.

[0418] In some embodiments, an anti-TREM2 antibody comprises a heavy chain variable region comprising an amino acid sequence that has at least 75% sequence identity (e.g., at least 80%, 85%, 90%, 91%, 92%, 93%, 94%, 95%, 96%, 97%, 98%, or 99% sequence identity to SEQ ID NO:314 and comprises a heavy chain CDR1-3 comprising the amino acid sequences of SEQ ID NOs:315, 316, and 317, respectively.

[0419] In some embodiments, an anti-TREM2 antibody comprises a light chain variable region comprising an amino acid sequence that has at least 75% sequence identity (e.g., at least 80%, 85%, 90%, 91%, 92%, 93%, 94%, 95%, 96%, 97%, 98%, or 99% sequence identity to SEQ ID NO:318 and comprises a light chain CDR1-3 comprising the amino acid sequences of SEQ ID NOs:48, 319, and 50, respectively.

[0420] In some embodiments, an anti-TREM2 antibody comprises a heavy chain variable region comprising an amino acid sequence that has at least 75% sequence identity (e.g., at least 80%, 85%, 90%, 91%, 92%, 93%, 94%, 95%, 96%, 97%, 98%, or 99% sequence identity to SEQ ID NO:314 and comprises a heavy chain CDR1-3 comprising the amino acid sequences of SEQ ID NOs:315, 316, and 317, respectively, and comprises a light chain variable region comprising an amino acid sequence that has at least 75% sequence identity (e.g., at least 80%, 85%, 90%, 91%, 92%, 93%, 94%, 95%, 96%, 97%, 98%, or 99% sequence identity to SEQ ID NO:318 and comprises a light chain CDR1-3 comprising the amino acid sequences of SEQ ID NOs:48, 319, and 50, respectively.

[0421] In some embodiments, an anti-TREM2 antibody is an antibody that competes for binding with an antibody as described herein (e.g., an antibody comprising a heavy chain CDR1-3 and a light chain CDR1-3 comprising the amino acid sequences of SEQ ID NOs:315, 316, 317, 48, 319, and 50, respectively, or an antibody comprising a heavy chain variable region comprising the amino acid sequence of SEQ ID NO:314 and further comprising a light chain variable region comprising the amino acid sequence of SEQ ID NO:318).

### Preparation of Antibodies

[0422] In some embodiments, antibodies are prepared by immunizing an animal or animals (e.g., mice, rabbits, or rats) with an antigen or a mixture of antigens for the induction of an antibody response. In some embodiments, the antigen or mixture of antigens is administered in conjugation with an adjuvant (e.g., Freund's adjuvant). After an initial immunization, one or more subsequent booster injections of the antigen or antigens may be administered to improve antibody production. Following immunization, antigen-specific B cells are harvested, e.g., from the spleen and/or lymphoid tissue. For generating monoclonal antibodies, the B cells are fused with myeloma cells, which are subsequently screened for antigen specificity. Methods of preparing antibodies are also described in the Examples section below.

[0423] The genes encoding the heavy and light chains of an antibody of interest can be cloned from a cell, e.g., the genes encoding a monoclonal antibody can be cloned from a hybridoma and used to produce a recombinant monoclonal antibody. Gene libraries encoding heavy and light chains of monoclonal antibodies can also be made from hybridoma or plasma cells. Alternatively, phage or yeast display technology can be used to identify antibodies and Fab fragments that specifically bind to selected antigens. Antibodies can also be made bispecific, i.e., able to recognize two different antigens. Antibodies can also be heteroconjugates, e.g., two covalently joined antibodies, or immunotoxins.

[0424] Antibodies can be produced using any number of expression systems, including prokaryotic and eukaryotic expression systems. In some embodiments, the expression system is a mammalian cell expression, such as a hybridoma, or a CHO cell expression system. Many such systems are widely available from commercial suppliers. In embodiments in which an antibody comprises both a VH and VL region, the VH and VL regions may be expressed using a single vector, e.g., in a di-cistronic expression unit, or under the control of different promoters. In other embodiments, the VH and VL region may be expressed using separate vectors. A VH or VL region as described herein may optionally comprise a methionine at the N-terminus.

[0425] In some embodiments, the antibody is a chimeric antibody. Methods for making chimeric antibodies are known in the art. For example, chimeric antibodies can be made in which the antigen binding region (heavy chain variable region and light chain variable region) from one species, such as a mouse, is fused to the effector region (constant domain) of another species, such as a human. As another example, “class switched” chimeric antibodies can be made in which the effector region of an antibody is substituted with an effector region of a different immunoglobulin class or subclass.

[0426] In some embodiments, the antibody is a humanized antibody. Generally, a non-human antibody is humanized in order to reduce its immunogenicity. Humanized antibodies typically comprise one or more variable regions (e.g., CDRs) or portions thereof that are non-human (e.g., derived from a mouse variable region sequence), and possibly some framework regions or portions thereof that are non-human, and further comprise one or more constant regions that are derived from human antibody sequences. Methods for humanizing non-human antibodies are known in the art. Transgenic mice, or other organisms such as other mammals, can be used to express humanized or human antibodies. Other methods of humanizing antibodies include, for example, variable domain resurfacing, CDR grafting, grafting specificity-determining residues (SDR), guided selection, and framework shuffling.

[0427] As an alternative to humanization, fully human antibodies can be generated. As a non-limiting example, transgenic animals (e.g., mice) can be produced that are capable, upon immunization, of producing a full repertoire of human antibodies in the absence of endogenous immunoglobulin production. For example, it has been described that the homozygous deletion of the antibody heavy-chain joining region (JH) gene in chimeric and germ-line mutant mice results in complete inhibition of endogenous antibody production. Transfer of the human germ-line immunoglobulin gene array in such germ-line mutant mice will result in the production of human antibodies upon antigen challenge. As another example, human antibodies can be produced by hybridoma-based methods, such as by using primary human B cells for generating cell lines producing human monoclonal antibodies.

[0428] Human antibodies can also be produced using phage display or yeast display technology. In phage display, repertoires of variable heavy chain and variable light chain genes are amplified and expressed in phage display vectors. In some embodiments, the antibody library is a natural repertoire amplified from a human source. In some embodiments, the antibody library is a synthetic library made by cloning heavy chain and light chain sequences and recombining to generate a large pool of antibodies with different antigenic specificity. Phage typically display antibody fragments (e.g., Fab fragments or scFv fragments), which are then screened for binding to an antigen of interest.

[0429] In some embodiments, antibody fragments (such as a Fab, a Fab′, a F(ab′)₂, a scFv, a V_{H}, or a V_{HH}) are generated. Various techniques have been developed for the production of antibody fragments. Traditionally, these fragments were derived via proteolytic digestion of intact antibodies. However, these fragments can now be produced directly using recombinant host cells. For example, antibody fragments can be isolated from antibody phage libraries. Alternatively, Fab′-SH fragments can be directly recovered from E. coli cells and chemically coupled to form F(ab′)₂ fragments. According to another approach, F(ab′)₂ fragments can be isolated directly from recombinant host cell culture. Other techniques for the production of antibody fragments will be apparent to those skilled in the art.

[0430] In some embodiments, an antibody or an antibody fragment is conjugated to another molecule, e.g., polyethylene glycol (PEGylation) or serum albumin, to provide an extended half-life in vivo.

### Multispecific Antibodies

[0431] In some embodiments, multispecific antibodies comprising an anti-TREM2 antibody (or antigen-binding portion thereof) as described herein are provided, e.g., a bispecific antibody. Multispecific antibodies are antibodies that have binding specificities for at least two different sites. In some embodiments, a multispecific antibody (e.g., a bispecific antibody) has a binding specificity for TREM2 and has a binding specificity for at least one other antigen. In some embodiments, a multispecific antibody (e.g., a bispecific antibody) binds to two different TREM2 epitopes. In some embodiments, a multispecific antibody (e.g., a bispecific antibody) is capable of inducing TREM2 clustering at the cell surface. An illustrative method for measuring receptor clustering using confocal FRET microscopy is described in Wallrabe et al., Biophys. 1, 2003, 85:559-571.

[0432] Methods for making multispecific antibodies include, but are not limited to, recombinant co-expression of two pairs of heavy chain and light chain in a host cell, “knobs-into-holes” engineering, intramolecular trimerization, and fusion of an antibody fragment to the N-terminus or C-terminus of another antibody, e.g., tandem variable domains.

### Nucleic Acids, Vectors, and Host Cells

[0433] In some embodiments, the anti-TREM2 antibodies as described herein are prepared using recombinant methods. Accordingly, in some aspects, the disclosure provides isolated nucleic acids comprising a nucleic acid sequence encoding any of the anti-TREM2 antibodies as described herein (e.g., any one or more of the CDRs, heavy chain variable regions, and light chain variable regions described herein); vectors comprising such nucleic acids; and host cells into which the nucleic acids are introduced that are used to replicate the antibody-encoding nucleic acids and/or to express the antibodies.

[0434] In some embodiments, a polynucleotide (e.g., an isolated polynucleotide) comprises a nucleotide sequence encoding an antibody or antigen-binding portion thereof as described herein (e.g., as described in the Section above entitled “Anti-TREM2 Antibody Sequences”). In some embodiments, the polynucleotide comprises a nucleotide sequence encoding one or more amino acid sequences (e.g., CDR, heavy chain, light chain, and/or framework regions) that is identical to the sequence (e.g., CDR, heavy chain, light chain, and/or framework region sequence) of an antibody clone selected from the group consisting of 2G4.B1, 3D3.A1, 7B10.A2, 8A11.B1, 13B11.A1, 14D5.F1, 14H11.A1, 19F10.F3, 21D4.D1, 21D6.G2, 21D11, 22B8.B1, 22G9.D1, 24B4.A1, 26D2.D1, 26D5.A1, 26D11.B1, 26E2.A3, 30A8.A1, 30F2.A2, 38E9.E5, 39H10.A1, 40H3.A4, 42E8.H1, 43E9.H1, 44E2.H1, 44E3.B1, 49H11.B1, 51D4, 52H9.D1, 53H11.D3, 54C2.A1, 55B9.A1, 57D7.A1, 59C6.F1, 60A4.B1, RS9.E2, RS9.F6, RS9.F10, RS11.1F5, RS11.1G6, RS11.1A10, RS11.1D11, RS11.4A5, RS11.4H6, RS11.4D7, RS11.4D9, RS11.4F11, RS12.1C6, RS12.1C10, RS12.2D1, RS12.2D4, RS12.2E1, RS12.2F2, RS12.2G1, RS12.2H1, and RS12.3C10. In some embodiments, a polynucleotide as described herein is operably linked to a heterologous nucleic acid, e.g., a heterologous promoter.

[0435] Suitable vectors containing polynucleotides encoding antibodies of the present disclosure, or fragments thereof, include cloning vectors and expression vectors. While the cloning vector selected may vary according to the host cell intended to be used, useful cloning vectors generally have the ability to self-replicate, may possess a single target for a particular restriction endonuclease, and/or may carry genes for a marker that can be used in selecting clones containing the vector. Examples include plasmids and bacterial viruses, e.g., pUC18, pUC19, Bluescript (e.g., pBS SK+) and its derivatives, mp18, mp19, pBR322, pMB9, ColE1, pCR1, RP4, phage DNAs, and shuttle vectors such as pSA3 and pAT28. These and many other cloning vectors are available from commercial vendors such as BioRad, Strategene, and Invitrogen.

[0436] Expression vectors generally are replicable polynucleotide constructs that contain a nucleic acid of the present disclosure. The expression vector may replicate in the host cells either as episomes or as an integral part of the chromosomal DNA. Suitable expression vectors include but are not limited to plasmids, viral vectors, including adenoviruses, adeno-associated viruses, retroviruses, and any other vector.

[0437] Suitable host cells for cloning or expressing a polynucleotide or vector as described herein include prokaryotic or eukaryotic cells. In some embodiments, the host cell is prokaryotic. In some embodiments, the host cell is eukaryotic, e.g., Chinese Hamster Ovary (CHO) cells or lymphoid cells. In some embodiments, the host cell is a human cell, e.g., a Human Embryonic Kidney (HEK) cell.

[0438] In another aspect, methods of making an anti-TREM2 antibody as described herein are provided. In some embodiments, the method includes culturing a host cell as described herein (e.g., a host cell expressing a polynucleotide or vector as described herein) under conditions suitable for expression of the antibody. In some embodiments, the antibody is subsequently recovered from the host cell (or host cell culture medium).

### IV. Fc Polypeptide Modifications for Blood-Brain Barrier (Bbb) Receptor Binding

[0439] In some aspects, provided herein are anti-TREM2 antibodies that are capable of being transported across the blood-brain barrier (BBB). Such a protein comprises a modified Fc polypeptide that binds to a BBB receptor. BBB receptors are expressed on BBB endothelia, as well as other cell and tissue types. In some embodiments, the BBB receptor is a transferrin receptor (TfR).

[0440] Amino acid residues designated in various Fc modifications, including those introduced in a modified Fc polypeptide that binds to a BBB receptor, e.g., TfR, are numbered herein using EU index numbering. Any Fc polypeptide, e.g., an IgG1, IgG2, IgG3, or IgG4 Fc polypeptide, may have modifications, e.g., amino acid substitutions, in one or more positions as described herein.

[0441] In some embodiments, an anti-TREM2 antibody comprises a first and optionally a second Fc polypeptide, each of which can be independently modified. In some embodiments, modifications (e.g., that promote TfR binding) that are made to the first and/or second Fc polypeptides result in an increase in brain uptake of the antibody (or antigen-binding portion thereof) of at least about 2-fold, 3-fold, 4-fold, 5-fold, 6-fold, 7-fold, 8-fold, 9-fold, 10-fold, 11-fold, 12-fold, 13-fold, 14-fold, 15-fold, 16-fold, 17-fold, 18-fold, 19-fold, 20-fold, or more, compared to the uptake without the modifications having been made.

[0442] A modified (e.g., enhancing heterodimerization and/or BBB receptor-binding) Fc polypeptide can have at least 70% identity, at least 75% identity, at least 80% identity, at least 85% identity, at least 90% identity, or at least 95% identity to a native Fc region sequence or a fragment thereof, e.g., a fragment of at least 50 amino acids or at least 100 amino acids, or greater in length. In some embodiments, the native Fc amino acid sequence is the Fc region sequence of SEQ ID NO:98. In some embodiments, the modified Fc polypeptide has at least 70% identity, at least 75% identity, at least 80% identity, at least 85% identity, at least 90% identity, or at least 95% identity to amino acids 1-110 of SEQ ID NO:98, or to amino acids 111-217 of SEQ ID NO:98, or a fragment thereof, e.g., a fragment of at least 50 amino acids or at least 100 amino acids, or greater in length.

[0443] In some embodiments, a modified (e.g., enhancing heterodimerization and/or BBB receptor-binding) Fc polypeptide comprises at least 50 amino acids, or at least 60, 65, 70, 75, 80, 85, 90, or 95 or more, or at least 100 amino acids, or more, that correspond to a native Fc region amino acid sequence. In some embodiments, the modified Fc polypeptide comprises at least 25 contiguous amino acids, or at least 30, 35, 40, or 45 contiguous amino acids, or 50 contiguous amino acids, or at least 60, 65, 70, 75, 80 85, 90, or 95 or more contiguous amino acids, or 100 or more contiguous amino acids, that correspond to a native Fc region amino acid sequence, such as SEQ ID NO:98.

[0444] In some embodiments, the domain that is modified for BBB receptor-binding activity is a human Ig CH3 domain, such as an IgG1 CH3 domain. The CH3 domain can be of any IgG subtype, i.e., from IgG1, IgG2, IgG3, or IgG4. In the context of IgG1 antibodies, a CH3 domain refers to the segment of amino acids from about position 341 to about position 447 as numbered according to the EU numbering scheme.

[0445] In some embodiments, the domain that is modified for BBB receptor-binding activity is a human Ig CH2 domain, such as an IgG CH2 domain. The CH2 domain can be of any IgG subtype, i.e., from IgG1, IgG2, IgG3, or IgG4. In the context of IgG1 antibodies, a CH2 domain refers to the segment of amino acids from about position 231 to about position 340 as numbered according to the EU numbering scheme.

[0446] In some embodiments, a modified (e.g., BBB receptor-binding) Fc polypeptide comprises at least one, two, or three substitutions; and in some embodiments, at least four five, six, seven, eight, nine, or ten substitutions at amino acid positions comprising 266, 267, 268, 269, 270, 271, 295, 297, 298, and 299, according to the EU numbering scheme.

[0447] In some embodiments, a modified (e.g., BBB receptor-binding) Fc polypeptide comprises at least one, two, or three substitutions; and in some embodiments, at least four, five, six, seven, eight, or nine substitutions at amino acid positions comprising 274, 276, 283, 285, 286, 287, 288, 289, and 290, according to the EU numbering scheme.

[0448] In some embodiments, a modified (e.g., BBB receptor-binding) Fc polypeptide comprises at least one, two, or three substitutions; and in some embodiments, at least four, five, six, seven, eight, nine, or ten substitutions at amino acid positions comprising 268, 269, 270, 271, 272, 292, 293, 294, 296, and 300, according to the EU numbering scheme.

[0449] In some embodiments, a modified (e.g., BBB receptor-binding) Fc polypeptide comprises at least one, two, or three substitutions; and in some embodiments, at least four, five, six, seven, eight, or nine substitutions at amino acid positions comprising 272, 274, 276, 322, 324, 326, 329, 330, and 331, according to the EU numbering scheme.

[0450] In some embodiments, a modified (e.g., BBB receptor-binding) Fc polypeptide comprises at least one, two, or three substitutions; and in some embodiments, at least four, five, six, or seven substitutions at amino acid positions comprising 345, 346, 347, 349, 437, 438, 439, and 440, according to the EU numbering scheme.

[0451] In some embodiments, a modified (e.g., BBB receptor-binding) Fc polypeptide comprises at least one, two, or three substitutions; and in some embodiments, at least four, five, six, seven, eight, or nine substitutions at amino acid positions 384, 386, 387, 388, 389, 390, 413, 416, and 421, according to the EU numbering scheme.

[0452] In some embodiments, an anti-TREM2 antibody comprises two Fc polypeptides, wherein one Fc polypeptide is not modified to bind to a BBB receptor (e.g., TfR) and the other Fc polypeptide is modified to specifically bind to a BBB receptor (e.g., TfR).

### FcRn Binding Sites

[0453] In certain aspects, modified (e.g., BBB receptor-binding) Fc polypeptides, or Fc polypeptides that do not specifically bind to a BBB receptor, can also comprise an FcRn binding site. In some embodiments, the FcRn binding site is within the Fc polypeptide or a fragment thereof.

[0454] In some embodiments, the FcRn binding site comprises a native FcRn binding site. In some embodiments, the FcRn binding site does not comprise amino acid changes relative to the amino acid sequence of a native FcRn binding site. In some embodiments, the native FcRn binding site is an IgG binding site, e.g., a human IgG binding site. In some embodiments, the FcRn binding site comprises a modification that alters FcRn binding.

[0455] In some embodiments, one or more Fc polypeptides (e.g., a first Fc polypeptide, a second Fc polypeptide, or a first and second Fc polypeptide) contain modifications that affect (e.g., increase) FcRn binding. In some embodiments, an FcRn binding site has one or more amino acid residues that are mutated, e.g., substituted, wherein the mutation(s) increase serum half-life or do not substantially reduce serum half-life (i.e., reduce serum half-life by no more than 25% compared to a counterpart modified Fc polypeptide having the wild-type residues at the mutated positions when assayed under the same conditions). In some embodiments, an FcRn binding site has one or more amino acid residues that are substituted at positions 251-256, 428, and 433-436, according to the EU numbering scheme.

[0456] In some embodiments, one or more residues at or near an FcRn binding site are mutated, relative to a native human IgG sequence, to extend serum half-life of the modified polypeptide. In some embodiments, a mutation, e.g., a substitution, is introduced at one or more of positions 244-257, 279-284, 307-317, 383-390, and 428-435, according to the EU numbering scheme. In some embodiments, one or more mutations are introduced at positions 251, 252, 254, 255, 256, 307, 308, 309, 311, 312, 314, 385, 386, 387, 389, 428, 433, 434, or 436, according to the EU numbering scheme. In some embodiments, mutations are introduced into one, two, or three of positions 252, 254, and 256. In some embodiments, the mutations are M252Y, S254T, and T256E. In some embodiments, a modified Fc polypeptide further comprises the mutations M252Y, S254T, and T256E. In some embodiments, a modified Fc polypeptide comprises a mutation at one, two, or all three of positions T307, E380, and N434, according to the EU numbering scheme. In some embodiments, the mutations are T307Q and N434A. In some embodiments, a modified Fc polypeptide comprises mutations T307A, E380A, and N434A. In some embodiments, a modified Fc polypeptide comprises mutations at positions T250 and M428, according to the EU numbering scheme. In some embodiments, the Fc polypeptide comprises mutations T250Q and/or M428L. In some embodiments, a modified Fc polypeptide comprises mutations at positions M428 and N434, according to the EU numbering scheme. In some embodiments, the modified Fc polypeptide comprises mutations M428L and N434S. In some embodiments, the modified Fc polypeptide comprises an N434S or N434A mutation.

### Transferrin Receptor-Binding Fc Polypeptides

[0457] In some embodiments, an anti-TREM2 antibody as disclosed herein comprises a modified Fc polypeptide that binds to a transferrin receptor (TfR) and is capable of being transported across the blood-brain barrier (BBB). In some embodiments, a modified Fc polypeptide that specifically binds to TfR comprises substitutions in a CH3 domain. In some embodiments, a modified Fc polypeptide that specifically binds to TfR comprises substitutions in a CH2 domain.

[0458] TfR-Binding Fc Polypeptides Comprising Mutations in the CH3 Domain

[0459] In some embodiments, a modified Fc polypeptide that specifically binds to TfR comprises substitutions in a CH3 domain. In some embodiments, a modified Fc polypeptide comprises a human Ig CH3 domain, such as an IgG CH3 domain, that is modified for TfR-binding activity. The CH3 domain can be of any IgG subtype, i.e., from IgG1, IgG2, IgG3, or IgG4. In the context of IgG antibodies, a CH3 domain refers to the segment of amino acids from about position 341 to about position 447 as numbered according to the EU numbering scheme.

[0460] In some embodiments, a modified Fc polypeptide that specifically binds to TfR binds to the apical domain of TfR and may bind to TfR without blocking or otherwise inhibiting binding of transferrin to TfR. In some embodiments, binding of transferrin to TfR is not substantially inhibited. In some embodiments, binding of transferrin to TfR is inhibited by less than about 50% (e.g., less than about 45%, 40%, 35%, 30%, 25%, 20%, 15%, 10%, or 5%). In some embodiments, binding of transferrin to TfR is inhibited by less than about 20% (e.g., less than about 19%, 18%, 17%, 16%, 15%, 14%, 13%, 12%, 11%, 10%, 9%, 8%, 7%, 6%, 5%, 4%, 3%, 2%, or 1%).

[0461] In some embodiments, a modified Fc polypeptide that specifically binds to TfR comprises at least two, three, four, five, six, seven, eight, or nine substitutions at positions 384, 386, 387, 388, 389, 390, 413, 416, and 421, according to the EU numbering scheme. Illustrative substitutions that may be introduced at these positions are shown in Tables 11 and 12. In some embodiments, the amino acid at position 388 and/or 421 is an aromatic amino acid, e.g., Trp, Phe, or Tyr. In some embodiments, the amino acid at position 388 is Trp. In some embodiments, the aromatic amino acid at position 421 is Trp or Phe.

[0462] In some embodiments, at least one position as follows is substituted: Leu, Tyr, Met, or Val at position 384; Leu, Thr, His, or Pro at position 386; Val, Pro, or an acidic amino acid at position 387; an aromatic amino acid, e.g. Trp at position 388; Val, Ser, or Ala at position 389; an acidic amino acid, Ala, Ser, Leu, Thr, or Pro at position 413; Thr or an acidic amino acid at position 416; or Trp, Tyr, His, or Phe at position 421. In some embodiments, the modified Fc polypeptide may comprise a conservative substitution, e.g., an amino acid in the same charge grouping, hydrophobicity grouping, side chain ring structure grouping (e.g., aromatic amino acids), or size grouping, and/or polar or non-polar grouping, of a specified amino acid at one or more of the positions in the set. Thus, for example, Ile may be present at position 384, 386, and/or position 413. In some embodiments, the acidic amino acid at position one, two, or each of positions 387, 413, and 416 is Glu. In other embodiments, the acidic amino acid at one, two or each of positions 387, 413, and 416 is Asp. In some embodiments, two, three, four, five, six, seven, or all eight of positions 384, 386, 387, 388, 389, 413, 416, and 421 have an amino acid substitution as specified in this paragraph.

[0463] In some embodiments, an Fc polypeptide that is modified as described in the preceding two paragraphs comprises a native Asn at position 390. In some embodiments, the modified Fc polypeptide comprises Gly, His, Gln, Leu, Lys, Val, Phe, Ser, Ala, or Asp at position 390. In some embodiments, the modified Fc polypeptide further comprises one, two, three, or four substitutions at positions comprising 380, 391, 392, and 415, according to the EU numbering scheme. In some embodiments, Trp, Tyr, Leu, or Gln may be present at position 380. In some embodiments, Ser, Thr, Gln, or Phe may be present at position 391. In some embodiments, Gln, Phe, or His may be present at position 392. In some embodiments, Glu may be present at position 415.

[0464] In certain embodiments, the modified Fc polypeptide comprises two, three, four, five, six, seven, eight, nine, ten, or eleven positions selected from the following: Trp, Leu, or Glu at position 380; Tyr or Phe at position 384; Thr at position 386; Glu at position 387; Trp at position 388; Ser, Ala, Val, or Asn at position 389; Ser or Asn at position 390; Thr or Ser at position 413; Glu or Ser at position 415; Glu at position 416; and/or Phe at position 421. In some embodiments, the modified Fc polypeptide comprises all eleven positions as follows: Trp, Leu, or Glu at position 380; Tyr or Phe at position 384; Thr at position 386; Glu at position 387; Trp at position 388; Ser, Ala, Val, or Asn at position 389; Ser or Asn at position 390; Thr or Ser at position 413; Glu or Ser at position 415; Glu at position 416; and/or Phe at position 421.

[0465] In certain embodiments, the modified Fc polypeptide comprises Leu or Met at position 384; Leu, His, or Pro at position 386; Val at position 387; Trp at position 388; Val or Ala at position 389; Pro at position 413; Thr at position 416; and/or Trp at position 421. In some embodiments, the modified Fc polypeptide further comprises Ser, Thr, Gln, or Phe at position 391. In some embodiments, the modified Fc polypeptide further comprises Trp, Tyr, Leu, or Gln at position 380 and/or Gln, Phe, or His at position 392. In some embodiments, Trp is present at position 380 and/or Gln is present at position 392. In some embodiments, the modified Fc polypeptide does not have a Trp at position 380.

[0466] In other embodiments, the modified Fc polypeptide comprises Tyr at position 384; Thr at position 386; Glu or Val and position 387; Trp at position 388; Ser at position 389; Ser or Thr at position 413; Glu at position 416; and/or Phe at position 421. In some embodiments, the modified Fc polypeptide comprises a native Asn at position 390. In certain embodiments, the modified Fc polypeptide further comprises Trp, Tyr, Leu, or Gln at position 380; and/or Glu at position 415. In some embodiments, the modified Fc polypeptide further comprises Trp at position 380 and/or Glu at position 415.

[0467] In additional embodiments, the modified Fc polypeptide further comprises one, two, or three substitutions at positions comprising 414, 424, and 426, according to the EU numbering scheme. In some embodiments, position 414 is Lys, Arg, Gly, or Pro; position 424 is Ser, Thr, Glu, or Lys; and/or position 426 is Ser, Trp, or Gly.

[0468] In some embodiments, the modified Fc polypeptide comprises one or more of the following substitutions: Trp at position 380; Thr at position 386; Trp at position 388; Val at position 389; Thr or Ser at position 413; Glu at position 415; and/or Phe at position 421, according to the EU numbering scheme.

[0469] In some embodiments, the modified Fc polypeptide has at least 70% identity, at least 75% identity, at least 80% identity, at least 85% identity, at least 90% identity, or at least 95% identity to amino acids 111-217 of any one of SEQ ID NOs:100-185, 219-298, or 337-460 (e.g., SEQ ID NOs:100-136 or 337-350). In some embodiments, the modified Fc polypeptide has at least 70% identity, at least 75% identity, at least 80% identity, at least 85% identity, at least 90% identity, or at least 95% identity to any one of SEQ ID NOs:100-185, 219-298, or 337-460 (e.g., SEQ ID NOs:100-136 or 337-350). In some embodiments, the modified Fc polypeptide comprises the amino acids at EU index positions 384-390 and/or 413-421 of any one of SEQ ID NOs:100-185, 219-298, or 337-460 (e.g., SEQ ID NOs:100-136 or 337-350). In some embodiments, the modified Fc polypeptide comprises the amino acids at EU index positions 380-390 and/or 413-421 of any one of SEQ ID NOs:100-185, 219-298, or 337-460 (e.g., SEQ ID NOs:100-136 or 337-350). In some embodiments, the modified Fc polypeptide comprises the amino acids at EU index positions 380-392 and/or 413-426 of any one of SEQ ID NOs:100-185, 219-298, or 337-460 (e.g., SEQ ID NOs:100-136 or 337-350).

[0470] In some embodiments, the modified Fc polypeptide has at least 75% identity, at least 80% identity, at least 85% identity, at least 90% identity, or at least 95% identity to any one of SEQ ID NOs:100-185, 219-298, or 337-460 (e.g., SEQ ID NOs:100-136 or 337-350), and further comprises at least five, six, seven, eight, nine, ten, eleven, twelve, thirteen, fourteen, fifteen, or sixteen of the positions, numbered according to the EU index, as follows: Trp, Tyr, Leu, Gln, or Glu at position 380; Leu, Tyr, Met, or Val at position 384; Leu, Thr, His, or Pro at position 386; Val, Pro, or an acidic amino acid at position 387; an aromatic amino acid, e.g. Trp, at position 388; Val, Ser, or Ala at position 389; Ser or Asn at position 390; Ser, Thr, Gln, or Phe at position 391; Gln, Phe, or His at position 392; an acidic amino acid, Ala, Ser, Leu, Thr, or Pro at position 413; Lys, Arg, Gly or Pro at position 414; Glu or Ser at position 415; Thr or an acidic amino acid at position 416; Trp, Tyr, His or Phe at position 421; Ser, Thr, Glu or Lys at position 424; and Ser, Trp, or Gly at position 426.

[0471] In some embodiments, the modified Fc polypeptide comprises the amino acid sequence of any one of SEQ ID NOs:100-136 or 337-350. In other embodiments, the modified Fc polypeptide comprises the amino acid sequence of any one of SEQ ID NOs: 100-136 or 337-350, but in which one, two, or three amino acids are substituted.

[0472] In some embodiments, the modified Fc polypeptide comprises additional mutations such as the mutations described in Section IV below, including, but not limited to, a knob mutation (e.g., T366W as numbered with reference to EU numbering), hole mutations (e.g., T366S, L368A, and Y407V as numbered with reference to EU numbering), mutations that modulate effector function (e.g., L234A, L235A, and/or P329G (e.g., L234A and L235A) as numbered with reference to EU numbering), and/or mutations that increase serum stability (e.g., M252Y, S254T, and T256E, or N434S with or without M428L, as numbered with reference to EU numbering). By way of illustration, SEQ ID NOS:227-298 and 351-460 provide non-limiting examples of modified Fc polypeptides with mutations in the CH3 domain (e.g., clones CH3C.35.20.1, CH3C.35.23.2, CH3C.35.23.3, CH3C.35.23.4, CH3C.35.21.17.2, CH3C.35.23, CH3C.35.21, CH3C.35.20.1.1, CH3C.35.23.2.1, and CH3C.35.23.1.1) comprising one or more of these additional mutations.

[0473] In some embodiments, the modified Fc polypeptide comprises a knob mutation (e.g., T366W as numbered with reference to EU numbering) and has at least 85% identity, at least 90% identity, or at least 95% identity to the sequence of any one of SEQ ID NOs:227, 239, 251, 263, 275, 287, 355, 367, and 379. In some embodiments, the modified Fc polypeptide comprises the sequence of any one of SEQ ID NOs:227, 239, 251, 263, 275, 287, 355, 367, and 379.

[0474] In some embodiments, the modified Fc polypeptide comprises a knob mutation (e.g., T366W as numbered with reference to EU numbering) and mutations that modulate effector function (e.g., L234A, L235A, and/or P329G (e.g., L234A and L235A) as numbered with reference to EU numbering), and has at least 85% identity, at least 90% identity, or at least 95% identity to the sequence of any one of SEQ ID NOS:228, 229, 240, 241, 252, 253, 264, 265, 276, 277, 288, 289, 351, 356, 357, 368, 369, 380, and 381. In some embodiments, the modified Fc polypeptide comprises the sequence of any one of SEQ ID NOS:228, 229, 240, 241, 252, 253, 264, 265, 276, 277, 288, 289, 351, 356, 357, 368, 369, 380, and 381.

[0475] In some embodiments, the modified Fc polypeptide comprises a knob mutation (e.g., T366W as numbered with reference to EU numbering) and mutations that increase serum stability (e.g., M252Y, S254T, and T256E, or N434S with or without M428L, as numbered with reference to EU numbering), and has at least 85% identity, at least 90% identity, or at least 95% identity to the sequence of any one of SEQ ID NOS:230, 242, 254, 266, 278, 290, 358, 370, 382, 392, 399, 406, 413, 420, 427, 434, 441, 448, and 455. In some embodiments, the modified Fc polypeptide comprises the sequence of any one of SEQ ID NOS:230, 242, 254, 266, 278, 290, 358, 370, 382, 392, 399, 406, 413, 420, 427, 434, 441, 448, and 455.

[0476] In some embodiments, the modified Fc polypeptide comprises a knob mutation (e.g., T366W as numbered with reference to EU numbering), mutations that modulate effector function (e.g., L234A, L235A, and/or P329G (e.g., L234A and L235A) as numbered with reference to EU numbering), and mutations that increase serum stability (e.g., M252Y, S254T, and T256E, or N434S with or without M428L, as numbered with reference to EU numbering), and has at least 85% identity, at least 90% identity, or at least 95% identity to the sequence of any one of SEQ ID NOS:231, 232, 243, 244, 255, 256, 267, 268, 279, 280, 291, 292, 352, 359, 360, 371, 372, 383, 384, 393, 394, 400, 401, 407, 408, 414, 415, 421, 422, 428, 429, 435, 436, 442, 443, 449, 450, 456, and 457. In some embodiments, the modified Fc polypeptide comprises the sequence of any one of SEQ ID NOS:231, 232, 243, 244, 255, 256, 267, 268, 279, 280, 291, 292, 352, 359, 360, 371, 372, 383, 384, 393, 394, 400, 401, 407, 408, 414, 415, 421, 422, 428, 429, 435, 436, 442, 443, 449, 450, 456, and 457.

[0477] In some embodiments, the modified Fc polypeptide comprises hole mutations (e.g., T366S, L368A, and Y407V as numbered with reference to EU numbering) and has at least 85% identity, at least 90% identity, or at least 95% identity to the sequence of any one of SEQ ID NOS:233, 245, 257, 269, 281, 293, 361, 373, and 385. In some embodiments, the modified Fc polypeptide comprises the sequence of any one of SEQ ID NOS:233, 245, 257, 269, 281, 293, 361, 373, and 385.

[0478] In some embodiments, the modified Fc polypeptide comprises hole mutations (e.g., T366S, L368A, and Y407V as numbered with reference to EU numbering) and mutations that modulate effector function (e.g., L234A, L235A, and/or P329G (e.g., L234A and L235A) as numbered with reference to EU numbering), and has at least 85% identity, at least 90% identity, or at least 95% identity to the sequence of any one of SEQ ID NOS:234, 235, 246, 247, 258, 259, 270, 271, 282, 283, 294, 295, 353, 362, 363, 374, 375, 386, and 387. In some embodiments, the modified Fc polypeptide comprises the sequence of any one of SEQ ID NOS:234, 235, 246, 247, 258, 259, 270, 271, 282, 283, 294, 295, 353, 362, 363, 374, 375, 386, and 387.

[0479] In some embodiments, the modified Fc polypeptide comprises hole mutations (e.g., T366S, L368A, and Y407V as numbered with reference to EU numbering) and mutations that increase serum stability (e.g., M252Y, S254T, and T256E, or N434S with or without M428L, as numbered with reference to EU numbering), and has at least 85% identity, at least 90% identity, or at least 95% identity to the sequence of any one of SEQ ID NOS:236, 248, 260, 272, 284, 296, 364, 376, 388, 395, 402, 409, 416, 423, 430, 437, 444, 451, and 458. In some embodiments, the modified Fc polypeptide comprises the sequence of any one of SEQ ID NOS:236, 248, 260, 272, 284, 296, 364, 376, 388, 395, 402, 409, 416, 423, 430, 437, 444, 451, and 458.

[0480] In some embodiments, the modified Fc polypeptide comprises hole mutations (e.g., T366S, L368A, and Y407V as numbered with reference to EU numbering), mutations that modulate effector function (e.g., L234A, L235A, and/or P329G (e.g., L234A and L235A) as numbered with reference to EU numbering), and mutations that increase serum stability (e.g., M252Y, S254T, and T256E, or N434S with or without M428L, as numbered with reference to EU numbering), and has at least 85% identity, at least 90% identity, or at least 95% identity to the sequence of any one of SEQ ID NOS:237, 238, 249, 250, 261, 262, 273, 274, 285, 286, 297, 298, 354, 365, 366, 377, 378, 389, 390, 396, 397, 403, 404, 410, 411, 417, 418, 424, 425, 431, 432, 438, 439, 445, 446, 452, 453, 459, and 460. In some embodiments, the modified Fc polypeptide comprises the sequence of any one of SEQ ID NOS:237, 238, 249, 250, 261, 262, 273, 274, 285, 286, 297, 298, 354, 365, 366, 377, 378, 389, 390, 396, 397, 403, 404, 410, 411, 417, 418, 424, 425, 431, 432, 438, 439, 445, 446, 452, 453, 459, and 460.

[0481] In some embodiments, a modified Fc polypeptide that specifically binds to TfR comprises at least two, three, four, five, six, seven, or eight substitutions at positions 345, 346, 347, 349, 437, 438, 439, and 440, according to the EU numbering scheme. Illustrative modified Fc polypeptides are provided in SEQ ID NOs:186-190. In some embodiments, the modified Fc polypeptide comprises Gly at position 437; Phe at position 438; and/or Asp at position 440. In some embodiments, Glu is present at position 440. In certain embodiments, the modified Fc polypeptide comprises at least one substitution at a position as follows: Phe or Ile at position 345; Asp, Glu, Gly, Ala, or Lys at position 346; Tyr, Met, Leu, Ile, or Asp at position 347; Thr or Ala at position 349; Gly at position 437; Phe at position 438; His Tyr, Ser, or Phe at position 439; or Asp at position 440. In some embodiments, two, three, four, five, six, seven, or all eight of positions 345, 346, 347, 349, 437, 438, 439, and 440 and have a substitution as specified in this paragraph. In some embodiments, the modified Fc polypeptide may comprise a conservative substitution, e.g., an amino acid in the same charge grouping, hydrophobicity grouping, side chain ring structure grouping (e.g., aromatic amino acids), or size grouping, and/or polar or non-polar grouping, of a specified amino acid at one or more of the positions in the set.

[0482] In some embodiments, the modified Fc polypeptide has at least 70% identity, at least 75% identity, at least 80% identity, at least 85% identity, at least 90% identity, or at least 95% identity to amino acids 111-217 of any one of SEQ ID NOs:186-190. In some embodiments, the modified Fc polypeptide has at least 70% identity, at least 75% identity, at least 80% identity, at least 85% identity, at least 90% identity, or at least 95% identity to SEQ ID NOs:186-190. In some embodiments, the modified Fc polypeptide comprises the amino acid sequence of any one of SEQ ID NOs:186-190. In other embodiments, the modified Fc polypeptide comprises the amino acid sequence of any one of SEQ ID NOs:186-190, but in which one, two, or three amino acids are substituted.

[0483] TfR-binding Fc polypeptides comprising mutations in the CH2 domain

[0484] In some embodiments, a modified Fc polypeptide that specifically binds to TfR comprises substitutions in a CH2 domain. In some embodiments, a modified Fc polypeptide comprises a human Ig CH2 domain, such as an IgG CH2 domain, that is modified for TfR-binding activity. The CH2 domain can be of any IgG subtype, i.e., from IgG1, IgG2, IgG3, or IgG4. In the context of IgG antibodies, a CH2 domain refers to the segment of amino acids from about position 231 to about position 340 as numbered according to the EU numbering scheme.

[0485] In some embodiments, a modified Fc polypeptide that specifically binds to TfR binds to the apical domain of TfR and may bind to TfR without blocking or otherwise inhibiting binding of transferrin to TfR. In some embodiments, binding of transferrin to TfR is not substantially inhibited. In some embodiments, binding of transferrin to TfR is inhibited by less than about 50% (e.g., less than about 45%, 40%, 35%, 30%, 25%, 20%, 15%, 10%, or 5%). In some embodiments, binding of transferrin to TfR is inhibited by less than about 20% (e.g., less than about 19%, 18%, 17%, 16%, 15%, 14%, 13%, 12%, 11%, 10%, 9%, 8%, 7%, 6%, 5%, 4%, 3%, 2%, or 1%).

[0486] In some embodiments, a modified Fc polypeptide that specifically binds to TfR comprises at least two, three, four, five, six, seven, eight, or nine substitutions at positions 274, 276, 283, 285, 286, 287, 288, and 290, according to the EU numbering scheme. Illustrative modified Fc polypeptides are provided in SEQ ID NOs:191-195. In some embodiments, the modified Fc polypeptide comprises Glu at position 287 and/or Trp at position 288. In some embodiments, the modified Fc polypeptide comprises at least one substitution at a position as follows: Glu, Gly, Gln, Ser, Ala, Asn, Tyr, or Trp at position 274; Ile, Val, Asp, Glu, Thr, Ala, or Tyr at position 276; Asp, Pro, Met, Leu, Ala, Asn, or Phe at position 283; Arg, Ser, Ala, or Gly at position 285; Tyr, Trp, Arg, or Val at position 286; Glu at position 287; Trp or Tyr at position 288; Gln, Tyr, His, Ile, Phe, Val, or Asp at position 289; or Leu, Trp, Arg, Asn, Tyr, or Val at position 290. In some embodiments, two, three, four, five, six, seven, eight, or all nine of positions 274, 276, 283, 285, 286, 287, 288, and 290 have a substitution as specified in this paragraph. In some embodiments, the modified Fc polypeptide may comprise a conservative substitution, e.g., an amino acid in the same charge grouping, hydrophobicity grouping, side chain ring structure grouping (e.g., aromatic amino acids), or size grouping, and/or polar or non-polar grouping, of a specified amino acid at one or more of the positions in the set.

[0487] In some embodiments, the modified Fc polypeptide comprises Glu, Gly, Gin, Ser, Ala, Asn, or Tyr at position 274; Ile, Val, Asp, Glu, Thr, Ala, or Tyr at position 276 Asp, Pro, Met, Leu, Ala, or Asn at position 283; Arg, Ser, or Ala at position 285; Tyr, Trp, Arg, or Val at position 286; Glu at position 287; Trp at position 288; Gin, Tyr, His, Ile, Phe, or Val at position 289; and/or Leu, Trp, Arg, Asn, or Tyr at position 290. In some embodiments, the modified Fc polypeptide comprises Arg at position 285; Tyr or Trp at position 286; Glu at position 287; Trp at position 288; and/or Arg or Trp at position 290.

[0488] In some embodiments, the modified Fc polypeptide has at least 70% identity, at least 75% identity, at least 80% identity, at least 85% identity, at least 90% identity, or at least 95% identity to amino acids 1-110 of any one of SEQ ID NOs:191-195. In some embodiments, the modified Fc polypeptide has at least 70% identity, at least 75% identity, at least 80% identity, at least 85% identity, at least 90% identity, or at least 95% identity to SEQ ID NOs:191-195. In some embodiments, the modified Fc polypeptide comprises the amino acid sequence of any one of SEQ ID NOs:191-195. In other embodiments, the modified Fc polypeptide comprises the amino acid sequence of any one of SEQ ID NOs:191-195, but in which one, two, or three amino acids are substituted.

[0489] In some embodiments, a modified Fc polypeptide that specifically binds to TfR comprises at least two, three, four, five, six, seven, eight, nine, or ten substitutions at positions 266, 267, 268, 269, 270, 271, 295, 297, 298, and 299, according to the EU numbering scheme. Illustrative modified Fc polypeptides are provided in SEQ ID NOs:196-200. In some embodiments, the modified Fc polypeptide comprises Pro at position 270, Glu at position 295, and/or Tyr at position 297. In some embodiments, the modified Fc polypeptide comprises at least one substitution at a position as follows: Pro, Phe, Ala, Met, or Asp at position 266; Gin, Pro, Arg, Lys, Ala, Ile, Leu, Glu, Asp, or Tyr at position 267; Thr, Ser, Gly, Met, Val, Phe, Trp, or Leu at position 268; Pro, Val, Ala, Thr, or Asp at position 269; Pro, Val, or Phe at position 270; Trp, Gin, Thr, or Glu at position 271; Glu, Val, Thr, Leu, or Trp at position 295; Tyr, His, Val, or Asp at position 297; Thr, His, Gin, Arg, Asn, or Val at position 298; or Tyr, Asn, Asp, Ser, or Pro at position 299. In some embodiments, two, three, four, five, six, seven, eight, nine, or all ten of positions 266, 267, 268, 269, 270, 271, 295, 297, 298, and 299 have a substitution as specified in this paragraph. In some embodiments, a modified Fc polypeptide may comprise a conservative substitution, e.g., an amino acid in the same charge grouping, hydrophobicity grouping, side chain ring structure grouping (e.g., aromatic amino acids), or size grouping, and/or polar or non-polar grouping, of a specified amino acid at one or more of the positions in the set.

[0490] In some embodiments, the modified Fc polypeptide comprises Pro, Phe, or Ala at position 266; Gln, Pro, Arg, Lys, Ala, or Ile at position 267; Thr, Ser, Gly, Met, Val, Phe, or Trp at position 268; Pro, Val, or Ala at position 269; Pro at position 270; Trp or Gln at position 271; Glu at position 295; Tyr at position 297; Thr, His, or Gln at position 298; and/or Tyr, Asn, Asp, or Ser at position 299.

[0491] In some embodiments, the modified Fc polypeptide comprises Met at position 266; Leu or Glu at position 267; Trp at position 268; Pro at position 269; Val at position 270; Thr at position 271; Val or Thr at position 295; His at position 197; His, Arg, or Asn at position 198; and/or Pro at position 299.

[0492] In some embodiments, the modified Fc polypeptide comprises Asp at position 266; Asp at position 267; Leu at position 268; Thr at position 269; Phe at position 270; Gln at position 271; Val or Leu at position 295; Val at position 297; Thr at position 298; and/or Pro at position 299.

[0493] In some embodiments, the modified Fc polypeptide has at least 70% identity, at least 75% identity, at least 80% identity, at least 85% identity, at least 90% identity, or at least 95% identity to amino acids 1-110 of any one of SEQ ID NOs:196-200. In some embodiments, the modified Fc polypeptide has at least 70% identity, at least 75% identity, at least 80% identity, at least 85% identity, at least 90% identity, or at least 95% identity to SEQ ID NOs:196-200. In some embodiments, the modified Fc polypeptide comprises the amino acid sequence of any one of SEQ ID NOs: 196-200. In other embodiments, the modified Fc polypeptide comprises the amino acid sequence of any one of SEQ ID NOs:196-200, but in which one, two, or three amino acids are substituted.

[0494] In some embodiments, a modified Fc polypeptide that specifically binds to TfR comprises at least two, three, four, five, six, seven, eight, nine, or ten substitutions at positions 268, 269, 270, 271, 272, 292, 293, 294, and 300, according to the EU numbering scheme. Illustrative modified Fc polypeptides are provided in SEQ ID NOs:201-205. In some embodiments, the modified Fc polypeptide comprises at least one substitution at a position as follows: Val or Asp at position 268; Pro, Met, or Asp at position 269; Pro or Trp at position 270; Arg, Trp, Glu, or Thr at position 271; Met, Tyr, or Trp at position 272; Leu or Trp at position 292; Thr, Val, Ile, or Lys at position 293; Ser, Lys, Ala, or Leu at position 294; His, Leu, or Pro at position 296; or Val or Trp at position 300. In some embodiments, two, three, four, five, six, seven, eight, nine, or all ten of positions 268, 269, 270, 271, 272, 292, 293, 294, and 300 have a substitution as specified in this paragraph. In some embodiments, the modified Fc polypeptide may comprise a conservative substitution, e.g., an amino acid in the same charge grouping, hydrophobicity grouping, side chain ring structure grouping (e.g., aromatic amino acids), or size grouping, and/or polar or non-polar grouping, of a specified amino acid at one or more of the positions in the set.

[0495] In some embodiments, the modified Fc polypeptide comprises Val at position 268; Pro at position 269; Pro at position 270; Arg or Trp at position 271; Met at position 272; Leu at position 292; Thr at position 293; Ser at position 294; His at position 296; and/or Val at position 300.

[0496] In some embodiments, the modified Fc polypeptide comprises Asp at position 268; Met or Asp at position 269; Trp at position 270; Glu or Thr at position 271; Tyr or Trp at position 272; Trp at position 292; Val, Ile, or Lys at position 293; Lys, Ala, or Leu at position 294; Leu or Pro at position 296; and/or Trp at position 300.

[0497] In some embodiments, the modified Fc polypeptide has at least 70% identity, at least 75% identity, at least 80% identity, at least 85% identity, at least 90% identity, or at least 95% identity to amino acids 1-110 of any one of SEQ ID NOs:201-205. In some embodiments, the modified Fc polypeptide has at least 70% identity, at least 75% identity, at least 80% identity, at least 85% identity, at least 90% identity, or at least 95% identity to SEQ ID NOs:201-205. In some embodiments, the modified Fc polypeptide comprises the amino acid sequence of any one of SEQ ID NOs:201-205. In other embodiments, the modified Fc polypeptide comprises the amino acid sequence of any one of SEQ ID NOs:201-205, but in which one, two, or three amino acids are substituted.

[0498] In some embodiments, a modified Fc polypeptide that specifically binds to TfR has at least two, three, four, five, six, seven, eight, nine, or ten substitutions at positions 272, 274, 276, 322, 324, 326, 329, 330, and 331, according to the EU numbering scheme. An illustrative modified polypeptide comprises Trp at position 330. In some embodiments, the modified Fc polypeptide comprises at least one substitution at a position as follows: Trp, Val, Ile, or Ala at position 272; Trp or Gly at position 274; Tyr, Arg, or Glu at position 276; Ser, Arg, or Gln at position 322; Val, Ser, or Phe at position 324; Ile, Ser, or Trp at position 326; Trp, Thr, Ser, Arg, or Asp at position 329; Trp at position 330; or Ser, Lys, Arg, or Val at position 331. In some embodiments, two, three, four, five, six, seven, eight, or all nine of positions 272, 274, 276, 322, 324, 326, 329, 330, and 331 have a substitution as specified in this paragraph. In some embodiments, the modified Fc polypeptide may comprise a conservative substitution, e.g., an amino acid in the same charge grouping, hydrophobicity grouping, side chain ring structure grouping (e.g., aromatic amino acids), or size grouping, and/or polar or non-polar grouping, of a specified amino acid at one or more of the positions in the set.

[0499] In some embodiments, the modified Fc polypeptide comprises two, three, four, five, six, seven, eight, or nine positions selected from the following: position 272 is Trp, Val, Ile, or Ala; position 274 is Trp or Gly; position 276 is Tyr, Arg, or Glu; position 322 is Ser, Arg, or Gln; position 324 is Val, Ser, or Phe; position 326 is Ile, Ser, or Trp; position 329 is Trp, Thr, Ser, Arg, or Asp; position 330 is Trp; and position 331 is Ser, Lys, Arg, or Val. In some embodiments, the modified Fc polypeptide comprises Val or Ile at position 272; Gly at position 274; Arg at position 276; Arg at position 322; Ser at position 324; Ser at position 326; Thr, Ser, or Arg at position 329; Trp at position 330; and/or Lys or Arg at position 331.

[0500] In some embodiments, the modified Fc polypeptide has at least 70% identity, at least 75% identity, at least 80% identity, at least 85% identity, at least 90% identity, or at least 95% identity to amino acids 1-110 of any one of SEQ ID NOs:206-210. In some embodiments, the modified Fc polypeptide has at least 70% identity, at least 75% identity, at least 80% identity, at least 85% identity, at least 90% identity, or at least 95% identity to SEQ ID NOs:206-210. In some embodiments, the modified Fc polypeptide comprises the amino acid sequence of any one of SEQ ID NOs:206-210. In other embodiments, the modified Fc polypeptide comprises the amino acid sequence of any one of SEQ ID NOs:206-210, but in which one, two, or three amino acids are substituted.

### Additional Fc Polypeptide Mutations

[0501] In some aspects, an anti-TREM2 antibody as disclosed herein comprises first and optionally second Fc polypeptides that may each comprise independently selected modifications or may be a wild-type Fc polypeptide, e.g., a human IgG1 Fc polypeptide. In some embodiments, one or both Fc polypeptides contains one or more modifications that confer binding to a blood-brain barrier (BBB) receptor, e.g., transferrin receptor (TfR). Non-limiting examples of other mutations that can be introduced into one or both Fc polypeptides include, e.g., mutations to increase serum stability, to modulate effector function, to influence glycosylation, to reduce immunogenicity in humans, and/or to provide for knob and hole heterodimerization of the Fc polypeptides.

[0502] In some embodiments, the Fc polypeptides include knob and hole mutations to promote heterodimer formation and hinder homodimer formation. Generally, the modifications introduce a protuberance (“knob”) at the interface of a first polypeptide and a corresponding cavity (“hole”) in the interface of a second polypeptide, such that the protuberance can be positioned in the cavity so as to promote heterodimer formation and thus hinder homodimer formation. Protuberances are constructed by replacing small amino acid side chains from the interface of the first polypeptide with larger side chains (e.g., tyrosine or tryptophan). Compensatory cavities of identical or similar size to the protuberances are created in the interface of the second polypeptide by replacing large amino acid side chains with smaller ones (e.g., alanine or threonine). In some embodiments, such additional mutations are at a position in the Fc polypeptide that does not have a negative effect on binding of the polypeptide to a BBB receptor, e.g., TfR.

[0503] In one illustrative embodiment of a knob and hole approach for dimerization, position 366 (numbered according to the EU numbering scheme) of one of the Fc polypeptides comprises a tryptophan in place of a native threonine. The other Fc polypeptide in the dimer has a valine at position 407 (numbered according to the EU numbering scheme) in place of the native tyrosine. The other Fc polypeptide may further comprise a substitution in which the native threonine at position 366 (numbered according to the EU numbering scheme) is substituted with a serine and a native leucine at position 368 (numbered according to the EU numbering scheme) is substituted with an alanine. Thus, one of the Fc polypeptides of has the T366W knob mutation and the other Fc polypeptide has the Y407V mutation, which is typically accompanied by the T366S and L368A hole mutations.

[0504] In some embodiments, modifications to enhance serum half-life may be introduced. For example, in some embodiments, one or both Fc polypeptides may comprise a tyrosine at position 252, a threonine at position 254, and a glutamic acid at position 256, as numbered according to the EU numbering scheme. Thus, one or both Fc polypeptides may have M252Y, S254T, and T256E substitutions. Alternatively, one or both Fc polypeptides may have M428L and N434S substitutions, according to EU numbering. Alternatively, one or both Fc polypeptides may have an N434S or N434A substitution.

[0505] In some embodiments, one or both Fc polypeptides may comprise modifications that reduce effector function, i.e., having a reduced ability to induce certain biological functions upon binding to an Fc receptor expressed on an effector cell that mediates the effector function. Examples of antibody effector functions include, but are not limited to, Clq binding and complement dependent cytotoxicity (CDC), Fc receptor binding, antibody-dependent cell-mediated cytotoxicity (ADCC), antibody-dependent cell-mediated phagocytosis (ADCP), down-regulation of cell surface receptors (e.g., B cell receptor), and B-cell activation. Effector functions may vary with the antibody class. For example, native human IgG1 and IgG3 antibodies can elicit ADCC and CDC activities upon binding to an appropriate Fc receptor present on an immune system cell; and native human IgG1, IgG2, IgG3, and IgG4 can elicit ADCP functions upon binding to the appropriate Fc receptor present on an immune cell.

[0506] In some embodiments, one or both Fc polypeptides may also be engineered to contain other modifications for heterodimerization, e.g., electrostatic engineering of contact residues within a CH3-CH3 interface that are naturally charged or hydrophobic patch modifications.

[0507] In some embodiments, one or both Fc polypeptides may include additional modifications that modulate effector function.

[0508] In some embodiments, one or both Fc polypeptides may comprise modifications that reduce or eliminate effector function. Illustrative Fc polypeptide mutations that reduce effector function include, but are not limited to, substitutions in a CH2 domain, e.g., at positions 234 and 235, according to the EU numbering scheme. For example, in some embodiments, one or both Fc polypeptides can comprise alanine residues at positions 234 and 235. Thus, one or both Fc polypeptides may have L234A and L235A (“LALA”) substitutions. In some embodiments, an Fc polypeptide that comprises one or more modifications that promote binding to TfR further comprises LALA substitutions. In some embodiments, an Fc polypeptide that does not comprise one or more modifications that promote binding to TfR comprises LALA substitutions. In some embodiments, both Fc polypeptides comprise LALA substitutions.

[0509] Additional Fc polypeptide mutations that modulate an effector function include, but are not limited to, one or more substitutions at positions 238, 265, 269, 270, 297, 327 and 329, according to the EU numbering scheme. Illustrative substitutions include the following: position 329 may have a mutation in which proline is substituted with a glycine or arginine or an amino acid residue large enough to destroy the Fc/Fcγ receptor interface that is formed between proline 329 of the Fc and tryptophan residues Trp 87 and Trp 110 of FcγRIII.

[0510] Additional illustrative substitutions include S228P, E233P, L235E, N297A, N297D, and P331S, according to the EU numbering scheme. Multiple substitutions may also be present, e.g., L234A and L235A of a human IgG1 Fc region; L234A, L235A, and P329G of a human IgG1 region; S228P and L235E of a human IgG4 Fc region; L234A and G237A of a human IgG1 Fc region; L234A, L235A, and G237A of a human IgG1 Fc region; V234A and G237A of a human IgG2 Fc region; L235A, G237A, and E318A of a human IgG4 Fc region; and S228P and L236E of a human IgG4 Fc region, according to the EU numbering scheme. In some embodiments, one or both Fc polypeptides may have one or more amino acid substitutions that modulate ADCC, e.g., substitutions at positions 298, 333, and/or 334, according to the EU numbering scheme.

### Illustrative Fc Polypeptides Comprising Additional Mutations

[0511] By way of non-limiting example, one or both Fc polypeptides present in an anti-TREM2 antibody of the disclosure may comprise additional mutations including a knob mutation (e.g., T366W as numbered according to the EU numbering scheme), hole mutations (e.g., T366S, L368A, and Y407V as numbered according to the EU numbering scheme), mutations that modulate effector function (e.g., L234A, L235A, and/or P329G (e.g., L234A and L235A) as numbered according to the EU numbering scheme), and/or mutations that increase serum stability (e.g., (i) M252Y, S254T, and T256E as numbered according to the EU numbering scheme, or (ii) N434S with or without M428L as numbered with reference to EU numbering).

[0512] In some embodiments, an Fc polypeptide may have a knob mutation (e.g., T366W as numbered according to the EU numbering scheme) and at least 85% identity, at least 90% identity, or at least 95% identity to the sequence of any one of SEQ ID NOs:98, 100-210, and 337-350. In some embodiments, an Fc polypeptide may have a knob mutation and the sequence of any one of SEQ ID NOs:98, 100-210, and 337-350. In some embodiments, an Fc polypeptide having the sequence of any one of SEQ ID NOs:98, 100-210, and 337-350 may be modified to have a knob mutation.

[0513] In some embodiments, an Fc polypeptide may have a knob mutation (e.g., T366W as numbered according to the EU numbering scheme), mutations that modulate effector function (e.g., L234A, L235A, and/or P329G (e.g., L234A and L235A) as numbered according to the EU numbering scheme), and at least 85% identity, at least 90% identity, or at least 95% identity to the sequence of any one of SEQ ID NOs:98, 100-210, and 337-350. In some embodiments, an Fc polypeptide may have a knob mutation, mutations that modulate effector function, and the sequence of any one of SEQ ID NOs:98, 100-210, and 337-350. In some embodiments, an Fc polypeptide having the sequence of any one of SEQ ID NOs:98, 100-210, and 337-350 may be modified to have a knob mutation and mutations that modulate effector function.

[0514] In some embodiments, an Fc polypeptide may have a knob mutation (e.g., T366W as numbered according to the EU numbering scheme), mutations that increase serum stability (e.g., (i) M252Y, S254T, and T256E as numbered according to the EU numbering scheme, or (ii) N434S with or without M428L as numbered with reference to EU numbering), and at least 85% identity, at least 90% identity, or at least 95% identity to the sequence of any one of SEQ ID NOs:98, 100-210, and 337-350. In some embodiments, an Fc polypeptide may have a knob mutation, mutations that increase serum stability, and the sequence of any one of SEQ ID NOs:98, 100-210, and 337-350. In some embodiments, an Fc polypeptide having the sequence of any one of SEQ ID NOs:98, 100-210, and 337-350 may be modified to have a knob mutation and mutations that increase serum stability.

[0515] In some embodiments, an Fc polypeptide may have a knob mutation (e.g., T366W as numbered according to the EU numbering scheme), mutations that modulate effector function (e.g., L234A, L235A, and/or P329G (e.g., L234A and L235A) as numbered according to the EU numbering scheme), mutations that increase serum stability (e.g., (i) M252Y, S254T, and T256E as numbered according to the EU numbering scheme, or (ii) N434S with or without M428L as numbered with reference to EU numbering), and at least 85% identity, at least 90% identity, or at least 95% identity to the sequence of any one of SEQ ID NOs:98, 100-210, and 337-350. In some embodiments, an Fc polypeptide may have a knob mutation, mutations that modulate effector function, mutations that increase serum stability, and the sequence of any one of SEQ ID NOs:98, 100-210, and 337-350. In some embodiments, an Fc polypeptide having the sequence of any one of SEQ ID NOs:98, 100-210, and 337-350 may be modified to have a knob mutation, mutations that modulate effector function, and mutations that increase serum stability.

[0516] In some embodiments, an Fc polypeptide may have hole mutations (e.g., T366S, L368A, and Y407V as numbered according to the EU numbering scheme) and at least 85% identity, at least 90% identity, or at least 95% identity to the sequence of any one of SEQ ID NOs:98, 100-210, and 337-350. In some embodiments, an Fc polypeptide may have hole mutations and the sequence of any one of SEQ ID NOs:98, 100-210, and 337-350. In some embodiments, an Fc polypeptide having the sequence of any one of SEQ ID NOs:98, 100-210, and 337-350 may be modified to have a hole mutation.

[0517] In some embodiments, an Fc polypeptide may have hole mutations (e.g., T366S, L368A, and Y407V as numbered according to the EU numbering scheme), mutations that modulate effector function (e.g., L234A, L235A, and/or P329G (e.g., L234A and L235A) as numbered according to the EU numbering scheme), and at least 85% identity, at least 90% identity, or at least 95% identity to the sequence of any one of SEQ ID NOs:98, 100-210, and 337-350. In some embodiments, an Fc polypeptide may have hole mutations, mutations that modulate effector function, and the sequence of any one of SEQ ID NOs:98, 100-210, and 337-350. In some embodiments, an Fc polypeptide having the sequence of any one of SEQ ID NOs:98, 100-210, and 337-350 may be modified to have hole mutations and mutations that modulate effector function.

[0518] In some embodiments, an Fc polypeptide may have hole mutations (e.g., T366S, L368A, and Y407V as numbered according to the EU numbering scheme), mutations that increase serum stability (e.g., (i) M252Y, S254T, and T256E as numbered according to the EU numbering scheme, or (ii) N434S with or without M428L as numbered with reference to EU numbering), and at least 85% identity, at least 90% identity, or at least 95% identity to the sequence of any one of SEQ ID NOs:98, 100-210, and 337-350. In some embodiments, an Fc polypeptide may have hole mutations, mutations that increase serum stability, and the sequence of any one of SEQ ID NOs:98, 100-210, and 337-350. In some embodiments, an Fc polypeptide having the sequence of any one of SEQ ID NOs:98, 100-210, and 337-350 may be modified to have hole mutations and mutations that increase serum stability.

[0519] In some embodiments, an Fc polypeptide may have hole mutations (e.g., T366S, L368A, and Y407V as numbered according to the EU numbering scheme), mutations that modulate effector function (e.g., L234A, L235A, and/or P329G (e.g., L234A and L235A) as numbered according to the EU numbering scheme), mutations that increase serum stability (e.g., (i) M252Y, S254T, and T256E as numbered according to the EU numbering scheme, or (ii) N434S with or without M428L as numbered with reference to EU numbering), and at least 85% identity, at least 90% identity, or at least 95% identity to the sequence of any one of SEQ ID NOs:98, 100-210, and 337-350. In some embodiments, an Fc polypeptide may have hole mutations, mutations that modulate effector function, mutations that increase serum stability, and the sequence of any one of SEQ ID NOs:98, 100-210, and 337-350. In some embodiments, an Fc polypeptide having the sequence of any one of SEQ ID NOs:98, 100-210, and 337-350 may be modified to have hole mutations, mutations that modulate effector function, and mutations that increase serum stability.

### V. Therapeutic and Prognostic Methods Using Anti-Trem2 Antibodies

[0520] In another aspect, methods for the use of anti-TREM2 antibodies as described herein are provided. In some embodiments, an anti-TREM2 antibody as described in Section III above is used in the practice of the methods described herein.

Treatment with Anti-TREM2 Antibodies

[0521] In some embodiments, methods of modulating one or more TREM2 activities in a subject having a neurodegenerative disease are provided. In some embodiments, the methods comprise modulating recruitment or phosphorylation of a kinase that interacts with a TREM2/DAP12 signaling complex (e.g., Syk kinase); modulating phagocytosis (e.g., phagocytosis of cell debris, amyloid beta particles, etc.); modulating cell migration (e.g., migration of myeloid cells, macrophages, microglia, and disease associated microglia); and/or modulating cell differentiation (e.g., for myeloid cells, macrophages, microglia, and disease associated microglia). In some embodiments, methods of enhancing one or more TREM2 activities in a subject having a neurodegenerative disease are provided. In some embodiments, methods of inhibiting one or more TREM2 activities in a subject having a neurodegenerative disease are provided. In some embodiments, the method of modulating one or more TREM2 activities in a subject comprises administering to the subject an isolated antibody or an antigen-binding portion thereof that specifically binds to a human TREM2 protein, e.g., an anti-TREM2 antibody as describe herein, or a pharmaceutical composition comprising an anti-TREM2 antibody as described herein.

[0522] In some embodiments, methods of modulating levels of sTREM2 in a subject having a neurodegenerative disease are provided. In some embodiments, methods of decreasing levels of sTREM2 in a subject having a neurodegenerative disease are provided. In some embodiments, methods of increasing levels of sTREM2 in a subject having a neurodegenerative disease are provided. In some embodiments, the method of modulating levels of sTREM2 in a subject comprises administering to the subject an isolated antibody or an antigen-binding portion thereof that specifically binds to a human TREM2 protein, e.g., an anti-TREM2 antibody as described herein, or a pharmaceutical composition comprising an anti-TREM2 antibody as described herein.

[0523] In some embodiments, methods of treating a neurodegenerative disease are provided. In some embodiments, the neurodegenerative disease is selected from the group consisting of Alzheimer's disease, primary age-related tauopathy, progressive supranuclear palsy (PSP), frontotemporal dementia, frontotemporal dementia with parkinsonism linked to chromosome 17, argyrophilic grain dementia, amyotrophic lateral sclerosis, amyotrophic lateral sclerosis/parkinsonism-dementia complex of Guam (ALS-PDC), corticobasal degeneration, chronic traumatic encephalopathy, Creutzfeldt-Jakob disease, dementia pugilistica, diffuse neurofibrillary tangles with calcification, Down's syndrome, familial British dementia, familial Danish dementia, Gerstmann-Straussler-Scheinker disease, globular glial tauopathy, Guadeloupean parkinsonism with dementia, Guadelopean PSP, Hallevorden-Spatz disease, hereditary diffuse leukoencephalopathy with spheroids (HDLS), Huntington's disease, inclusion-body myositis, multiple system atrophy, myotonic dystrophy, Nasu-Hakola disease, neurofibrillary tangle-predominant dementia, Niemann-Pick disease type C, pallido-ponto-nigral degeneration, Parkinson's disease, Pick's disease, postencephalitic parkinsonism, prion protein cerebral amyloid angiopathy, progressive subcortical gliosis, subacute sclerosing panencephalitis, and tangle only dementia. In some embodiments, the neurodegenerative disease is Alzheimer's disease. In some embodiments, the neurodegenerative disease is Nasu-Hakola disease. In some embodiments, the neurodegenerative disease is frontotemporal dementia. In some embodiments, the neurodegenerative disease is Parkinson's disease. In some embodiments, the method comprises administering to the subject an isolated antibody or an antigen-binding portion thereof that specifically binds to a human TREM2 protein, e.g., an anti-TREM2 antibody as described herein, or a pharmaceutical composition comprising an anti-TREM2 antibody as described herein.

[0524] In some embodiments, an anti-TREM2 antibody (or antigen-binding portion or pharmaceutical composition thereof) as described herein is used in treating a neurodegenerative disease that is characterized by a mutation in TREM2. In some embodiments, the neurodegenerative disease that is characterized by a mutation in TREM2 is Alzheimer's disease, e.g., Alzheimer's disease that is characterized by a R47H mutation in TREM2.

[0525] In some embodiments, the subject to be treated is a human, e.g., a human adult or a human child.

[0526] In some embodiments, methods of reducing plaque accumulation in a subject having a neurodegenerative disease are provided. In some embodiments, the method comprises administering to the subject an antibody or pharmaceutical composition as described herein. In some embodiments, the subject has Alzheimer's disease. In some embodiments, the subject is an animal model of a neurodegenerative disease (e.g., a 5XFAD or APP/PS1 mouse model). In some embodiments, plaque accumulation is measured by amyloid plaque imaging and/or Tau imaging, e.g., using positron emission tomography (PET) scanning. In some embodiments, administration of an anti-TREM2 antibody reduces plaque accumulation by at least 20%, at least 30%, at least 40%, at least 50%, at least 60%, at least 70%, at least 80%, or at least 90% as compared to a baseline value (e.g., the level of plaque accumulation in the subject prior to administration of the anti-TREM2 antibody).

[0527] In some embodiments, an anti-TREM2 antibody is administered to a subject at a therapeutically effective amount or dose. A daily dose range of about 0.01 mg/kg to about 500 mg/kg, or about 0.1 mg/kg to about 200 mg/kg, or about 1 mg/kg to about 100 mg/kg, or about 10 mg/kg to about 50 mg/kg, can be used. The dosages, however, may be varied according to several factors, including the chosen route of administration, the formulation of the composition, patient response, the severity of the condition, the subject's weight, and the judgment of the prescribing physician. The dosage can be increased or decreased over time, as required by an individual patient. In certain instances, a patient initially is given a low dose, which is then increased to an efficacious dosage tolerable to the patient. Determination of an effective amount is well within the capability of those skilled in the art.

[0528] The route of administration of an anti-TREM2 antibody as described herein can be oral, intraperitoneal, transdermal, subcutaneous, intravenous, intramuscular, intrathecal, inhalational, topical, intralesional, rectal, intrabronchial, nasal, transmucosal, intestinal, ocular or otic delivery, or any other methods known in the art. In some embodiments, the antibody is administered orally, intravenously, or intraperitoneally.

[0529] In some embodiments, the anti-TREM2 antibody (and optionally another therapeutic agent) is administered to the subject over an extended period of time, e.g., for at least 30, 40, 50, 60, 70, 80, 90, 100, 150, 200, 250, 300, 350 days or longer.

Identifying Subjects as Candidates for Treatment with Anti-TREM2 Antibodies

[0530] In another aspect, methods of identifying a subject having a neurodegenerative disease as a candidate for treatment with an anti-TREM2 antibody are provided.

[0531] In some embodiments, the method comprises:
[0532] measuring the level of sTREM2 in a sample from the subject;
[0533] comparing the level of sTREM2 in the sample from the subject to a control value, wherein a level of sTREM2 in the sample from the subject that is elevated relative to the control value identifies the subject as a candidate for treatment; and
[0534] for a subject identified as a candidate for treatment, administering to the subject an isolated antibody or an antigen-binding portion thereof that specifically binds to a human TREM2 protein (e.g., an antibody as described herein).

[0535] In some embodiments, the isolated antibody or antigen-binding portion thereof is an antibody that decreases levels of sTREM2. In some embodiments, the antibody further has one or more TREM2-associated activities as described herein, recognizes an epitope of human TREM2 that is the same or substantially the same as an epitope recognized by an antibody clone as described herein, and/or comprises one or more CDR, heavy chain, and/or light chain sequences of an antibody clone as described herein.

[0536] In some embodiments, the method comprises:
[0537] measuring the level of sTREM2 in a sample from the subject;
[0538] comparing the level of sTREM2 in the sample from the subject to a control value, wherein a level of sTREM2 in the sample from the subject that is reduced relative to the control value identifies the subject as a candidate for treatment; and
[0539] for a subject identified as a candidate for treatment, administering to the subject an isolated antibody or an antigen-binding portion thereof that specifically binds to a human TREM2 protein (e.g., an antibody as described herein).

[0540] In some embodiments, the isolated antibody or antigen-binding portion thereof is an antibody that increases levels of sTREM2. In some embodiments, the antibody further has one or more TREM2-associated activities as described herein, recognizes an epitope of human TREM2 that is the same or substantially the same as an epitope recognized by an antibody clone as described herein, and/or comprises one or more CDR, heavy chain, and/or light chain sequences of an antibody clone as described herein.

[0541] In another aspect, methods of treating a subject having a neurodegenerative disease that has been identified as a candidate for treatment with an anti-TREM2 antibody are provided. In some embodiments, the method comprises administering to the subject an isolated antibody or an antigen-binding portion thereof that specifically binds to a human TREM2 protein (e.g., an antibody as described herein), wherein the subject has been identified as having an increased level of sTREM2, relative to a control value. In some embodiments, the isolated antibody or antigen-binding portion thereof is an antibody that decreases levels of sTREM2.

[0542] In some embodiments, the method comprises administering to the subject an isolated antibody or an antigen-binding portion thereof that specifically binds to a human TREM2 protein (e.g., an antibody as described herein), wherein the subject has been identified as having a reduced level of sTREM2, relative to a control value. In some embodiments, the isolated antibody or antigen-binding portion thereof is an antibody that increases levels of sTREM2.

[0543] In some embodiments, the level of sTREM2 is compared to a control value that is determined for a healthy control or population of healthy controls (i.e., not afflicted with a neurodegenerative disease). In some embodiments, a subject is identified as a candidate for treatment if the level of sTREM2 in a sample from the subject differs by at least 20%, at least 30%, at least 40%, at least 50%, at least 60%, at least 70%, at least 80%, at least 90% or more as compared to the control value. In some embodiments, a subject is identified as a candidate for treatment if the level of sTREM2 in a sample from the subject differs by at least 2-fold, 3-fold, 4-fold, 5-fold, 6-fold, 7-fold, 8-fold, 9-fold, 10-fold or more as compared to the control value. In some embodiments, the healthy control value is determined by assessing the level of sTREM2 in a subject or population of subjects (e.g., 10, 20, 50, 100, 200, 500, 1000 subjects or more) that all are known not to have a neurodegenerative disease.

[0544] In some embodiments, the level of sTREM2 is compared to a control value that is determined for a disease control or population of disease controls (e.g., a person or population afflicted with Alzheimer's, or a person or population afflicted with a neurodegenerative disease that is characterized by a mutation in TREM2, such as Alzheimer's disease that is characterized by a R47H mutation in TREM2). In some embodiments, a subject is identified as a candidate for treatment if the level of sTREM2 in a sample from the subject is comparable to (e.g., is within 20%, 10%, 5%, 4%, 3%, 2%, or 1%) of the level of sTREM2 in the disease control or population of disease controls. In some embodiments, the disease control value is determined by assessing the level of sTREM2 in a subject or population of subjects (e.g., 10, 20, 50, 100, 200, 500, 1000 subjects or more) that all are known to have the neurodegenerative disease, e.g., Alzheimer's disease.

[0545] In some embodiments, the population of subjects is matched to a test subject according to one or more patient characteristics such as age, sex, ethnicity, or other criteria. In some embodiments, the control value is established using the same type of sample from the population of subjects (e.g., a sample comprising cerebrospinal fluid) as is used for assessing the level of sTREM2 in the test subject.

[0546] In some embodiments, sTREM2 levels are measured using a sample that comprises a fluid, e.g., blood, plasma, serum, urine, or cerebrospinal fluid. In some embodiments, the sample comprises cerebrospinal fluid.

[0547] STREM2 levels can be measured according to methods described herein, e.g., as described in Section III above. In some embodiments, sTREM2 levels are measured using an ELISA assay.

Monitoring Efficacy of Treatment with Anti-TREM2 Antibodies

[0548] In another aspect, methods of monitoring the efficacy of treatment with an anti-TREM2 antibody for a subject having a neurodegenerative disease are provided. In some embodiments, the subject being treated has been diagnosed as having a neurodegenerative disease as described herein. In some embodiments, the subject has been diagnosed as having Alzheimer's disease. In some embodiments, the subject has been diagnosed as having a neurodegenerative disease that is characterized by a mutation in TREM2, such as Alzheimer's disease that is characterized by a R47H mutation in TREM2.

[0549] In some embodiments, the method comprises:
[0550] measuring the level of sTREM2 in a first sample from the subject taken prior to an administration of an anti-TREM2 antibody (e.g., the first administration to the subject);
[0551] treating the subject with an isolated antibody or an antigen-binding portion thereof that specifically binds to a human TREM2 protein (e.g., an antibody as described herein); and
[0552] measuring the level of sTREM2 in a second sample from the subject taken subsequent to the administration of the anti-TREM2 antibody;
[0553] wherein a decrease in sTREM2 level in the second sample from the subject, as compared to the first sample from the subject, indicates that the subject is responding to treatment with the anti-TREM2 antibody.

[0554] In some embodiments, a decrease of at least at least 20%, at least 30%, at least 40%, at least 50%, at least 60%, at least 70%, at least 80%, or at least 90% in the level of sTREM2 in the second sample from the subject, as compared to the first sample from the subject, indicates that the subject is responding to treatment with the anti-TREM2 antibody.

[0555] In some embodiments, the method comprises:
[0556] measuring the level of sTREM2 in a first sample from the subject taken prior to an administration of an anti-TREM2 antibody (e.g., the first administration to the subject);
[0557] treating the subject with an isolated antibody or an antigen-binding portion thereof that specifically binds to a human TREM2 protein (e.g., an antibody as described herein); and
[0558] measuring the level of sTREM2 in a second sample from the subject taken subsequent to the administration of the anti-TREM2 antibody;
[0559] wherein an increase in sTREM2 level in the second sample from the subject, as compared to the first sample from the subject, indicates that the subject is responding to treatment with the anti-TREM2 antibody.

[0560] In some embodiments, an increase of at least at least 20%, at least 30%, at least 40%, at least 50%, at least 60%, at least 70%, at least 80%, or at least 90% in the level of sTREM2 in the second sample from the subject, as compared to the first sample from the subject, indicates that the subject is responding to treatment with the anti-TREM2 antibody.

[0561] In some embodiments, the measuring steps comprise using an assay for sTREM2 levels as described herein, e.g., as described in Section III above. In some embodiments, the levels of sTREM2 in the samples are measured using an immunoassay, e.g., an ELISA assay.

[0562] In some embodiments, the sample is a sample as described herein (e.g., as described in Section III above). In some embodiments, the sample comprises a fluid, e.g., blood, plasma, serum, urine, or cerebrospinal fluid. In some embodiments, the sample comprises cerebrospinal fluid. In some embodiments, the first sample and the second sample are the same type of sample (e.g., each of the first sample and the second sample is a cerebrospinal fluid sample).

[0563] In some embodiments, the subject has been treated with an anti-TREM2 antibody (e.g., an antibody or antigen-binding portion thereof that has one or more TREM2-associated activities as described herein, recognizes an epitope of human TREM2 that is the same or substantially the same as an epitope recognized by an antibody clone as described herein, and/or comprises one or more CDR, heavy chain, and/or light chain sequences of an antibody clone as described herein) for at least 1 week, at least 2 weeks, at least 3 weeks, at least 4 weeks, at least 5 weeks, at least 6 weeks, at least 7 weeks, at least 8 weeks, at least 9 weeks, at least 10 weeks, or longer. In some embodiments, the subject has been treated with an anti-TREM2 antibody for at least 1 month, at least 2 months, at least 3 months, at least 4 months, at least 5 months, at least 6 months, or longer.

[0564] In some embodiments, depending on the level of change in sTREM2 levels that is detected in the second sample as compared to the first sample, the method can further comprise adjusting the dosage of the anti-TREM2 antibody that is administered to the subject (e.g., increasing or decreasing the dosage and/or frequency of administration of the anti-TREM2 antibody). In some embodiments, the method can further comprise adjusting the anti-TREM2 antibody that is administered (e.g., administering a different anti-TREM2 antibody). In some embodiments, the method can further comprise discontinuing treatment with the anti-TREM2 antibody.

### VI. Pharmaceutical Compositions and Kits

[0565] In still another aspect, pharmaceutical compositions and kits comprising an antibody that specifically binds to a human TREM2 protein are provided. In some embodiments, the pharmaceutical compositions and kits are for use in treating a neurodegenerative disease, e.g., a neurodegenerative disease that is characterized by a mutation in TREM2. In some embodiments, the pharmaceutical compositions and kits are for use in modulating (e.g., enhancing or inhibiting) one or more TREM2 activities, e.g., Syk phosphorylation. In some embodiments, the pharmaceutical compositions and kits are for use in modulating (e.g., decreasing or increasing) sTREM2 levels. In some embodiments, pharmaceutical compositions and kits are for use in identifying whether a subject having a neurodegenerative disease is a suitable candidate for treatment with an anti-TREM2 antibody. In some embodiments, the pharmaceutical compositions and kits are for use in monitoring the efficacy of treatment with an anti-TREM2 antibody in a subject having a neurodegenerative disease.

### Pharmaceutical Compositions

[0566] In some embodiments, pharmaceutical compositions comprising an anti-TREM2 antibody are provided. In some embodiments, the anti-TREM2 antibody is an antibody (or antigen-binding portion) as described in Section III above.

[0567] In some embodiments, a pharmaceutical composition comprises an anti-TREM2 antibody as described herein and further comprises one or more pharmaceutically acceptable carriers and/or excipients. A pharmaceutically acceptable carrier includes any solvents, dispersion media, or coatings that are physiologically compatible and that does not interfere with or otherwise inhibit the activity of the active agent. Various pharmaceutically acceptable excipients are well-known in the art.

[0568] In some embodiments, the carrier is suitable for intravenous, intramuscular, oral, intraperitoneal, intrathecal, transdermal, topical, or subcutaneous administration. Pharmaceutically acceptable carriers can contain one or more physiologically acceptable compound(s) that act, for example, to stabilize the composition or to increase or decrease the absorption of the active agent(s). Physiologically acceptable compounds can include, for example, carbohydrates, such as glucose, sucrose, or dextrans, antioxidants, such as ascorbic acid or glutathione, chelating agents, low molecular weight proteins, compositions that reduce the clearance or hydrolysis of the active agents, or excipients or other stabilizers and/or buffers. Other pharmaceutically acceptable carriers and their formulations are well-known in the art.

[0569] The pharmaceutical compositions described herein can be manufactured in a manner that is known to those of skill in the art, e.g., by means of conventional mixing, dissolving, granulating, dragee-making, emulsifying, encapsulating, entrapping or lyophilizing processes. The following methods and excipients are merely exemplary and are in no way limiting.

[0570] For oral administration, an anti-TREM2 antibody can be formulated by combining it with pharmaceutically acceptable carriers that are well known in the art. Such carriers enable the compounds to be formulated as tablets, pills, dragees, capsules, emulsions, lipophilic and hydrophilic suspensions, liquids, gels, syrups, slurries, suspensions and the like, for oral ingestion by a patient to be treated. Pharmaceutical preparations for oral use can be obtained by mixing the compounds with a solid excipient, optionally grinding a resulting mixture, and processing the mixture of granules, after adding suitable auxiliaries, if desired, to obtain tablets or dragee cores. Suitable excipients include, for example, fillers such as sugars, including lactose, sucrose, mannitol, or sorbitol; cellulose preparations such as, for example, maize starch, wheat starch, rice starch, potato starch, gelatin, gum tragacanth, methyl cellulose, hydroxypropylmethyl-cellulose, sodium carboxymethylcellulose, and/or polyvinylpyrrolidone (PVP). If desired, disintegrating agents can be added, such as a cross-linked polyvinyl pyrrolidone, agar, or alginic acid or a salt thereof such as sodium alginate.

[0571] An anti-TREM2 antibody can be formulated for parenteral administration by injection, e.g., by bolus injection or continuous infusion. For injection, the compound or compounds can be formulated into preparations by dissolving, suspending or emulsifying them in an aqueous or nonaqueous solvent, such as vegetable or other similar oils, synthetic aliphatic acid glycerides, esters of higher aliphatic acids or propylene glycol; and if desired, with conventional additives such as solubilizers, isotonic agents, suspending agents, emulsifying agents, stabilizers and preservatives. In some embodiments, compounds can be formulated in aqueous solutions, e.g., in physiologically compatible buffers such as Hanks's solution, Ringer's solution, or physiological saline buffer. Formulations for injection can be presented in unit dosage form, e.g., in ampules or in multi-dose containers, with an added preservative. The compositions can take such forms as suspensions, solutions or emulsions in oily or aqueous vehicles, and can contain formulatory agents such as suspending, stabilizing and/or dispersing agents.

[0572] In some embodiments, an anti-TREM2 antibody is prepared for delivery in a sustained-release, controlled release, extended-release, timed-release or delayed-release formulation, for example, in semi-permeable matrices of solid hydrophobic polymers containing the active agent. Various types of sustained-release materials have been established and are well known by those skilled in the art. Current extended-release formulations include film-coated tablets, multiparticulate or pellet systems, matrix technologies using hydrophilic or lipophilic materials and wax-based tablets with pore-forming excipients. Sustained-release delivery systems can, depending on their design, release the compounds over the course of hours or days, for instance, over 4, 6, 8, 10, 12, 16, 20, 24 hours or more. Usually, sustained release formulations can be prepared using naturally-occurring or synthetic polymers, for instance, polymeric vinyl pyrrolidones, such as polyvinyl pyrrolidone (PVP); carboxyvinyl hydrophilic polymers; hydrophobic and/or hydrophilic hydrocolloids, such as methylcellulose, ethylcellulose, hydroxypropylcellulose, and hydroxypropylmethylcellulose; and carboxypolymethylene.

[0573] Typically, a pharmaceutical composition for use in in vivo administration is sterile. Sterilization can be accomplished according to methods known in the art, e.g., heat sterilization, steam sterilization, sterile filtration, or irradiation.

[0574] Dosages and desired drug concentration of pharmaceutical compositions of the disclosure may vary depending on the particular use envisioned. The determination of the appropriate dosage or route of administration is well within the skill of one in the art. Suitable dosages are also described in Section V above.

### Kits

[0575] In some embodiments, kits comprising an anti-TREM2 antibody are provided. In some embodiments, the anti-TREM2 antibody is an antibody (or antigen-binding portion) as described in Section III above.

[0576] In some embodiments, the kit further comprises one or more additional therapeutic agents. For example, in some embodiments, the kit comprises an anti-TREM2 antibody as described herein and further comprises one or more additional therapeutic agents for use in the treatment of a neurodegenerative disease, e.g., Alzheimer's disease. In some embodiments, the therapeutic agent is an agent for use in treating a cognitive or behavioral symptom of a neurodegenerative disease (e.g., an antidepressant, a dopamine agonist, or an anti-psychotic). In some embodiments, the therapeutic agent is a neuroprotective agent (e.g., carbidopa/levodopa, an anticholinergic agent, a dopaminergic agent, a monoamine oxidase B (MAO-B) inhibitor, a catechol-O-methyl transferase (COMT) inhibitor, a glutamatergic agent, a histone deacetylase (HDAC) inhibitor, a cannabinoid, a caspase inhibitor, melatonin, an anti-inflammatory agent, a hormone (e.g., estrogen or progesterone), or a vitamin).

[0577] In some embodiments, the kit comprises an anti-TREM antibody as described herein and further comprises one or more reagents for measuring sTREM2 levels. In some embodiments, the kit comprises an anti-TREM antibody as described herein and further comprises one or more reagents for measuring TREM2 activity (e.g., for measuring Syk phosphorylation).

[0578] In some embodiments, the kit further comprises instructional materials containing directions (i.e., protocols) for the practice of the methods described herein (e.g., instructions for using the kit for a therapeutic or prognostic method as described in Section V above). While the instructional materials typically comprise written or printed materials they are not limited to such. Any medium capable of storing such instructions and communicating them to an end user is contemplated by this disclosure. Such media include, but are not limited to electronic storage media (e.g., magnetic discs, tapes, cartridges, chips), optical media (e.g., CD-ROM), and the like. Such media may include addresses to internet sites that provide such instructional materials.

### VII. Examples

[0579] The present invention will be described in greater detail by way of specific examples. The following examples are offered for illustrative purposes only, and are not intended to limit the invention in any manner.

### Example 1. Methods of Generating and Characterizing Anti-TREM2 Antibodies

### Recombinant Expression and Purification of Mouse Fc Fused Human TREM2 ECD

[0580] The ecto domain (residues 19-172) of human TREM2 (UniProtKB ID—Q9NZC2) was subcloned into pRK vector with the secretion signal from mouse IgG kappa chain V-III, amino acids 1-20 (UniProtKB ID—P01661) at the N-terminal region, and a mouse Fc tag at the C-terminal region with a GGGGS between TREM2 ECD and Fc.

[0581] Purified plasmid was transfected into Expi293F™ cells (Thermo Fisher) using the Expi293F™ Expression System Kit according to the manufacturer's instructions. To inhibit maturation of N-linked glycans and reduce glycosylation heterogeneity, kifunensine (Sigma), an inhibitor of high mannosidase I was added to the culture at 1 μg/mL concentration immediately after transfection. Transfected cells were incubated in an orbital shaker (Infors HT Multitron) at 125 rpm and 37° C. in a humidified atmosphere of 6% CO₂. ExpiFectamine™ 293 Transfection Enhancer 1 and 2 were added to the cells 16 hours post transfection and the media supernatant was harvested 96 hours post transfection. The clarified supernatant was supplemented with EDTA-free protease inhibitor (Roche) and was stored at −80° C.

[0582] For rhTREM2-mFc isolation, clarified media supernatant was loaded on HiTrap MabSelect SuRe Protein A affinity column (GE Healthcare Life Sciences) and washed with 200 mM arginine and 137 mM succinate buffer pH 5.0. The fusion protein was eluted in 100 mM QB citrate buffer pH 3.0 and 50 mM NaCl. Immediately after elution, 1M Tris-HCl buffer pH 8.0 was added to the protein solution to neutralize the pH. Protein aggregates were separated by size exclusion chromatography (SEC) on Superdex 200 increase 10/300 GL column (GE Healthcare Life Sciences). The SEC mobile phase buffer was kept at 20 mM Tris-HCl pH 8.0, 100 mM NaCl and 50 mM arginine, which was also the protein storage buffer. All chromatography steps were performed on AKTA pure or AKTA Avant systems (GE Healthcare Life Sciences).

### Recombinant Expression and Purification of His-Tagged TREM2 ECD

[0583] The ecto domain (residues 19-172) of TREM2 (UniProtKB—Q9NZC2) was sub cloned in the pRK vector with the secretion signal from mouse Ig kappa chain V-III, amino acids 1-20 (UniProtKB ID—P01661) at the N-terminal region, and a 6X-His tag at the C-terminal region. The insert was verified by sequencing and maxi prep plasmid purification was performed.

[0584] Purified plasmid was transfected into Expi293F™ cells (Thermo Fisher) using the Expi293F™ Expression System Kit according to the manufacturer's instructions. Transfected cells were incubated in an orbital shaker (Infors HT Multitron) at 125 rpm and 37° C. in a humidified atmosphere of 6% CO₂. ExpiFectamine™ 293 Transfection Enhancer 1 and 2 were added to the cells 16 hours post transfection and the media supernatant was harvested 96 hours post transfection.

[0585] Harvested media was supplemented with 1M imidazole pH 8.0 to a final concentration of 10 mM and filtered using the Nalgene™ Rapid-Flow™ disposable filter units (Thermo Fisher) with a pore size of 0.4 microns. HisPur™ Ni-NTA Resin (Thermo Fisher) was washed with MQ water and equilibrated with load buffer (20 mM Tris pH 8.0, 150 mM NaCl, and 10 mM imidazole). Affinity purification was performed using the gravity flow method. The harvested media was loaded onto the resin and nonspecifically bound proteins were washed with load buffer supplemented with 50 and 100 mM imidazole. The bound His-tagged TREM2 eco domain was eluted with 20 mM Tris pH 8.0, 150 mM NaCl, and 200 mM imidazole. Eluted protein was concentrated using Amicon 10 kDa concentrators and the concentrated protein was further purified by gel filtration chromatography using the AKTA Avant system (GE Healthcare Life Sciences). The protein was loaded onto a HiLoad Superdex 200 16/600 (GE Healthcare Life Sciences) column equilibrated with 1×PBS and eluted and fractionated using 1×PBS as the running buffer. Eluted fractions were analyzed by electrophoresis on polyacrylamide (PAGE) gels under denaturing and native conditions. Eluted fractions were further characterized by analytical size exclusion chromatography and the intact protein mass determination. Results from the PAGE and analytical characterization were used to pool the heavily glycosylated protein fractions and these were aliquoted and stored at −80° C.

### Immunization of Mice

[0586] Wild Type Balb/c and KO C57B16 mice were immunized with TREM2Fc protein and alternating injections of BWZ cells expressing TREM2 and DAP12 (“Trem2Dap12”). Immunizations were performed via footpad bi-weekly with 5-10 μg of antigen in Sigma adjuvant for 4-6 weeks. The serum titer was screened by a cell based ELISA. Animals with titers >10⁴ were selected for a final boost. Mice were given a final boost without adjuvant via footpad and sacrificed 3 days after the boost. Popliteal and inguinal lymph nodes were harvested, made into single cell suspensions by passing through cell strainers, and then the lymphocytes were used for hybridoma generation as described below.

### Generation of Hybridoma Library

[0587] B cells harvested from lymph nodes were processed and counted. They were mixed with P3X63Ag8 cells 1:1 and fused using a BTX Hybrimune Electrofusion apparatus. The fused hybridomas were plated in 60-96 well plates with 100 μL/well of HAT (hypoxanthine-aminopterin-thymidine) selection media. The plates were fed with HT (hypoxanthine thymidine) after a week. After two weeks, 50 μL/well of supernatant was collected and screened for antigen specific binding by cell ELISA as described below.

### Generation of Human TREM2/DAP12 Stable Expression HEK Cell Line

[0588] HEK293 cells were transfected with a vector expressing wild type human TREM2 and DAP12, variant TREM2 R47H and Dap12, and DAP12 alone, respectively. Stable expressing clones were selected and the cell surface TREM2 expression was evaluated by flow cytometer. APC-conjugated rat-anti-human/mouse-TREM2 monoclonal antibody (R&D MAB17291) was used for surface TREM2 expression analysis. Clone #6 showed the highest wild type TREM2 expression level and was selected and named as HEK293-H6. The clone with highest surface expression of variant TREM2 R47H was named HEK293-R4. The clones stably expressing DAP12 were analyzed by Western blot, and the selected clone was named HEK293-DAP12#1.

### Screening Antibodies for Binding by Protein ELISA

[0589] Hybridoma supernatants were screened in a Protein ELISA in a 384 well format. Four different proteins were coated in the 4 quadrants: TREM2-His, ADAM10 peptide 115-143 amino acids, 134-154 amino acids and 149-170 amino acids were coated in a 384 well plate in PBS at 1 jag/ml.

[0590] 25 μL/well of hybridoma supernatants were added to the plate. Plates were incubated at room temperature for 1 hour, washed with PBST buffer 3×. A secondary detection antibody goat anti-mouse HRP (Southern Biotech) at 1:7000 dilution in media, 25 μL/well was added to the plate and incubated at room temperature for 1 hour. After an hour, plates were washed three times with PBST buffer. Plates were developed with 25 μL/well of TMB substrate (ThermoFisher) and quenched with 25 μL/well of 1 N sulfuric acid. The signal was quantified on a BioTek® plate reader at A450. Wells with an OD three times the background for TREM2 and/or on peptides were considered positive and carried forward for secondary screening.

[0591] Antibody binding data for anti-TREM2 antibodies is shown in Table 1 below.

TABLE 1
Binding Data for TREM2 Antibodies

| Antibody Clone ID | Isotype | Human TREM2 Kd |
|---|---|---|
| RS9.F10 | Ig2a, k | 8.52E−10 |
| RS9.F6 | Ig2a, k | 7.33E−10 |
| 13B11.A1 | Ig2a, k | 9.67E−07 |
| 21D4.D1 | Ig2a, k | 1.82E−09 |
| 22B8.B1 | IgG3, k | 3.82E−08 |
| 3D3.A1 | Ig2a, k | 7.43E−09 |
| 42E8.H1 | Ig2a, k | 1.70E−08 |
| 43E9.H1 | Ig2b, k | 2.99E−07 |
| 30A8.A1 | Ig2a, k | 6.76E−08 |
| 21D6.G2 | Ig2b, k | 4.00E−07 |
| 57D7.A1 | Ig2a, k | 2.41E−09 |
| 59C6.F1 | N.D. | 2.38E−05 |
| 53H11.D3 | IgG1, k | 2.56E−08 |
| 60A4.B1 | IgG1, k | 6.75E−08 |
| 24B4.A1 | Ig2a, k | 1.24E−08 |
| 39H10.A1 | Ig2b, k | 1.84E−07 |
| 55B9.A1 | Ig2a, k | 1.12E−07 |
| 26E2.A3 | Ig2a, k | 1.28E−08 |
| 54C2.A1 | Ig2b, k | 2.19E−09 |
| 44E2.H1 | Ig2b, k | 7.68E−08 |
| 22G9.D1 | IgG1, k | 2.26E−08 |
| 14H11.A1 | IgG1, k | 5.75E−08 |
| 49H11.B1 | IgG3, k | 6.34E−08 |
| 40H3.A4 | N.D. | 8.98E−10 |
| 14D5.F1 | IgG3, k | 1.18E−08 |
| 38E9.E5 | IgG1, k | 2.01E−07 |
| RS9.E2 | N.D. | 1.97E−06 |
| 26D11.B1 | N.D. | 9.17E−09 |
| 44E3.B1 | IgG1, k | 2.28E−08 |
| 2G4.B1 | IgG2a, k | 1.04E−07 |
| 30F2.A2 | IgG2a, k | 2.94E−09 |
| 51D4 | IgG2a, k | 2.67E−09 |
| 52H9.D1 | N.D. | N.D. |
| 26D2.D1 | IgG2a, k | 1.50E−08 |
| 21D11 | IgG2a, k | 5.25E−10 |
| 26D5.A1 | IgG2b, k | 1.30E−08 |
| 8A11.B1 | IgG2a, k | N.B. |
| 7B10.A2 | N.D. | N.D. |
| 19F10.F3 | IgG2a, k | N.B. |

N.D. = not determined
N.B. = no binding detected

### Biacore

[0592] Anti-murine Fc antibody (obtained from GE Healthcare) was immobilized on the surface of a CM5 chip (obtained from GE Healthcare) through amine-coupling to reach about 6,000 to 8,000 response units (RU). The surface was activated by injection of a mixture of 1-ethyl-3-(3-dimethylaminopropyl)-carbodiimide (EDC) and N-hydroxysuccinimide (NHS), both obtained from GE Healthcare, for 7 minutes. Anti-murine Fc antibody was diluted in sodium acetate (pH 5.0) at 25 μg/mL and injected for 10 minutes at a flow rate of 5 μL/minute, followed by injection of ethanolamine (obtained from GE Healthcare) for 7 minutes.

[0593] Purified anti-TREM2 hybridoma (20 μg/mL) was captured to reach 1000-1500 RU. A range of serially-diluted TREM2-His protein (e.g., 3.4 nM to 300 nM) was injected at a flow rate of 30 μL/minute, using either single-cycle kinetics methods. Sensorgrams were fitted using a 1:1 Langmuir model to estimate kₒₙ and k_{off}.

### Screening Antibodies for Binding to Trem2Dap12 by Cell ELISA

[0594] Primary screening was performed by plating Trem2Dap12 expressing HEK 293 in 96 well cell culture Nunc plates in media. 50,000 cells/well were plated in assay medium and incubated at 37° C. On day two, the media from the plates was removed and 50 μL/well of hybridoma supernatants was added to the plates with incubation at 4° C. for 1 hour. After incubation, the plates were washed six times with HBSS buffer using the Biotek plate washer. A secondary detection antibody goat anti-mouse HRP (Southern Biotech) at 1:2000 dilution in media, 50 μL/well was added to the plate and incubated at 4° C. for 1 hour. After an hour, plates were washed six times with HBSS buffer. Plates were developed with 50 μL/well of TMB substrate (ThermoFisher) and quenched with 50 μL/well of 1 N sulfuric acid. The signal was quantified on a BioTek® plate reader at A450. Wells with an OD three times the background for TREM2 were considered positive and carried forward for secondary screening.

[0595] Positives from primary screening were carried forward into the secondary screening where they were screened in functional assays like sTREM2, pSyk and FACS binding.

### FACS Binding on Mixed Cell Lines

[0596] HEK 293 overexpressing human TREM2 (H6) and HEK 293 overexpressing GFP (B5) were harvested by 0.05% trypsin and incubated at 37° C. for 2 hours for surface TREM2 recovery. 293F overexpression mouse TREM2 were harvested and labelled with NucBlue live cell stain ReadyProbes reagent for 10 minutes (2 drops of reagent added per mL of media). After labeling, cells were washed twice with 1×PBS. NucBlue labeled 293F cells were mixed with H6 and B5 in FACS buffer (PBS-+-0.5% BSA) with human Trustain FcX solution (Biolegend, cat #422302) at a density of 10⁶/mL per cell line. Mixed cell lines were seeded at 300,000 cells per well in a 96-well round-bottom and incubated 20 minutes at room temperature. After incubation, cells were centrifuged and test anti-TREM2 antibodies were added, then incubated for 45 minutes on ice. After incubation, cells were centrifuged and washed with FACS buffer three times. Cells were then incubated with secondary antibody (Alexa Fluor 647 AffiniPure F(ab′)₂ fragment goat anti-mouse IgG, Fcγ fragment specific (1:200, Jackson ImmunoResearch, cat #115-606-071) for 30 minutes on ice. After incubation, cells were washed with FACS buffer three times and resuspended in 90 μL of FACS buffer, then analyzed by flow cytometry (BD FACSCanto II, San Jose, Calif.). 20,000 events were obtained for each sample.

[0597] Antibody surface binding data for anti-TREM2 antibodies binding to human or mouse TREM2-expressing cells is shown in FIGS. 1A-D and in Table 2 below. The data in Table 2 is presented as fold over binding (FOB).

TABLE 2
Antibody surface binding to human
or mouse TREM2-expressing HEK cells

| | Human TREM2 | Mouse TREM2 |
|---|---|---|
| Antibody | expressing | expressing |
| Clone ID | cells - FOB | cells - FOB |
| RS9.F10 | 12.9 | 75.8 |
| RS9.F6 | 13.2 | 73.0 |
| 13B11.A1 | 4.8 | 2.6 |
| 21D4.D1 | 12.3 | 4.0 |
| 22B8.B1 | 12.3 | 3.0 |
| 3D3.A1 | 11.7 | 8.4 |
| 42E8.H1 | 10.6 | 3.5 |
| 43E9.H1 | 10.6 | 7.0 |
| 30A8.A1 | 5.8 | 2.1 |
| 21D6.G2 | 5.4 | 7.1 |
| 57D7.A1 | 11.5 | 1.7 |
| 59C6.F1 | 11.5 | 1.2 |
| 53H11.D3 | 11.6 | 1.5 |
| 60A4.B1 | 10.8 | 1.5 |
| 24B4.A1 | 8.6 | 1.5 |
| 39H10.A1 | 7.0 | 1.2 |
| 55B9.A1 | 4.0 | 1.1 |
| 26E2.A3 | 10.3 | 1.5 |
| 54C2.A1 | 12.8 | 1.7 |
| 44E2.H1 | 7.8 | 1.7 |
| 22G9.D1 | 11.9 | 1.6 |
| 14H11.A1 | 3.0 | 1.2 |
| 49H11.B1 | 7.0 | 1.2 |
| 40H3.A4 | 1.0 | 0.8 |
| 14D5.F1 | 0.9 | 0.8 |
| 38E9.E5 | 2.9 | 1.0 |
| RS9.E2 | 1.0 | 0.8 |
| 26D11.B1 | 0.9 | 1.1 |
| 44E3.B1 | 4.0 | 1.5 |

| | Human TREM2 | Mouse TREM2 |
|---|---|---|
| Antibody | expressing | expressing |
| Clone ID | cells - FOB | cells - FOB |
| 2G4.B1 | 1.6 | 1.1 |
| 30F2.A2 | 8.0 | 1.3 |
| 51D4.A1 | 7.6 | 1.3 |
| 52H9.D1 | N.D | N.D |
| 44E2.H1.F2 | 6.1 | 1.9 |
| 26D2.D1 | 4.9 | 2.8 |
| 21D11.B1 | 8.4 | 1.5 |
| 26D5.A1 | 7.3 | 1.3 |
| 8A11.B1 | 0.9 | 0.9 |
| 7B10.A2 | N.D | N.D |
| 19F10.F3 | 1.1 | 1.1 |

N.D. = not determined

### FACS Binding on Primary Macrophages

[0598] Human monocytes were isolated following the RosetteSep human monocyte enrichment cocktail protocol (Stemcell Technologies, Cat #15068). Isolated monocytes were washed in wash buffer (PBS+2% FBS) and resuspended in 10 mL ACK lysis solution to lyse red blood cells. 20 mL wash buffer was added to stop the ACK lysis, then centrifuged and washed one more time with culture media (RPMI1640+10% FBS+P/S). Human monocytes were differentiated into macrophage in culture media (RPMI 1640+10% FBS+P/S) in the presence of 50 ng/mL human M-CSF at 250 mL flask. Fresh human M-CSF was spiked on day 3 and human macrophages were harvested on day 5. Human macrophages were resuspended in FACS buffer with human Trustain FcX solution (Biolegend, cat #422302) and 1% human serum at a density of 10⁶/mL and seeded at 100,000 cells per well in a 96-well round-bottom, then incubated 20 minutes at room temperature. Cells were centrifuged and the supernatant discarded, then test anti-TREM2 antibody was added (100 nM) into 96 well plates and incubated for 45 minutes on ice. After incubation, cells were centrifuged and washed with FACS buffer three times. Cells were then incubated with secondary antibody (APC goat anti-mouse Ig, multiple adsorption, BD Pharmingen, #550826, 1:500) for 30 minutes on ice. After incubation, cells were washed with FACS buffer three times and resuspended in 90 μL FACS buffer, then analyzed by flow cytometry (BD FACSCanto I1, San Jose, Calif.). 20,000 events were obtained for each sample.

[0599] Anti-TREM2 antibody binding to primary human macrophages is shown in FIG. 2.

### TREM2 Protein/Peptide ELISA

[0600] TREM2-His tagged protein or streptavidin were adsorbed to 384-well high-binding plates. Wells were blocked by the addition of 3% BSA/Tris-buffered saline containing 0.05% Tween-20 (TBST). Upon washing with TBST, biotinylated peptides corresponding to TREM2 amino acids 115-143, 134-154, or 149-170 were added to wells containing streptavidin. Plates were washed prior to addition of hybridoma supernatants or control antibodies. Primary detection antibodies were incubated for 1 hour at room temperature, followed by five TBST washes, prior to addition of an anti-mouse IgG-HRP conjugated secondary antibody. Following five TBST washes, detection reagent (One-step TMB Ultra, Thermo) was added and incubated for 7 minutes prior to addition of the stop reagent (2N sulfuric acid). Absorbance at 450 nm was measured using a Biotek plate reader. All steps were carried out using a Hamilton Nimbus liquid handler and a Biotek 405 plate washer.

TREM2 pSYK AlphaLisa

[0601] Activation of TREM2-dependent pSyk signaling was measured using a commercial AlphaLisa assay from Perkin-Elmer. This assay used a cell line termed H6, an engineered HEK 293 cell line that overexpresses TREM2 and DAP12 (an adaptor protein in TREM2 signaling). The cells were grown for 2-3 days in T-150 flasks prior to the assay in DMEM containing 1× glutamax, 10% FBS, 1× Pen/Strep solution, and 200 μg/mL zeomycin. Prior to the assay the cells were recovered by trypsinization, centrifugation, and resuspension in fresh antibiotic free media. They then were stored in a 50 mL conical tube for 2-6 hours in a 37° C. tissue culture incubator, after which they were centrifuged and resuspended in HBSS for use in the pSyk assay.

[0602] The samples containing anti-TREM2 antibodies for screening/testing in the pSyk assay were coated onto magnetic Protein G coated Dynabeads (Thermo Scientific) in 96 well plates, using a 1 hour incubation at room temperature with vigorous shaking. After coating the suspension of H6 cells was added to the bead-coated antibody (100 μL/well from a suspension of 3,000,000 cells/mL, for 300,000 cells per well). The 96-well plates containing antibody-coated beads and H6 cells were briefly incubated in a 37° C. tissue culture incubator for 5 minutes. Afterwards plates were removed and centrifuged. Supernatant was removed by pipetting and lysates prepared by addition of 25 μL/well of lysis buffer (from Cell Signaling Technology, supplemented with 1 mM PMSF), with mixing by pipetting. Before assaying the lysates were incubated for 30 minutes on ice.

[0603] After preparation and incubation of lysates, the lysates were assayed for pSyk using the standard protocol for the Perkin Elmer pSyk Alpha Lisa kit. In brief, 10 μL of lysate/well was transferred to a white opaque 384 well Optiplate (Perkin Elmer). Next 5 μL of Acceptor Mix (containing the working solution of acceptor beads) was added per well followed by sealing of plates with foil seals and incubation 1 hour at room temperature. After this 5 μL of Donor Mix (containing the working solution of donor beads) was added to each well under reduced light conditions. Plates were again sealed and incubated 1 hour at room temperature. Finally plates were read using Alpha Lisa settings on a Perkin Elmer EnVision plate reader. pSyk induction by anti-TREM2 antibodies is shown in FIG. 3A and in Table 3 below, and is presented as fold over background (FOB). FIG. 3B and Table 4 show EC50 values for selected antibody clones on human TREM2-expressing HEK cells.

TABLE 3
pSyk induction by TREM2 antibodies

| Antibody Clone ID | pSyk FOB (30 nM Ab) |
|---|---|
| 52H9.D1 | 51.67 |
| 24B4.A1 | 17.29 |
| 38E9.E5 | 13.67 |
| 14H11.A1 | 12.02 |
| 2G4.B1 | 11.70 |
| 49H11.B1 | 11.56 |
| 3D3.A1 | 10.35 |
| 30A8.A1 | 10.24 |
| RS9.F10 | 9.89 |
| 44E2.H1 | 9.82 |
| RS9.F6 | 8.49 |
| 55B9.A1 | 7.97 |
| 42E8.H1 | 7.17 |
| 7B10.A2 | 6.89 |
| 13B11.A1 | 6.87 |
| 54C2.A1 | 6.56 |
| RS9.E2 | 6.11 |
| 22G9.D1 | 6.03 |
| 43E9.H1 | 5.95 |
| 39H10.A1 | 5.94 |
| 53H11.D3 | 5.20 |
| 57D7.A1 | 5.02 |
| 26E2.A3 | 4.67 |
| 21D6.G2 | 4.40 |
| 60A4.B1 | 4.28 |
| 26D11.B1 | 2.89 |
| 14D5.F1 | 1.99 |
| 26D5.A1 | 1.81 |
| 26D2.D1 | 1.73 |
| 21D11.B1 | 1.68 |
| 19F10.F3 | 1.24 |
| 40H3.A4 | 1.23 |
| 8A11.B1 | 1.22 |
| 30F2.A2 | 1.17 |
| 51D4.A1 | 1.12 |
| IgG1 | 1.05 |
| 44E3.B1.A2 | 1.04 |
| 59C6.F1 | 1.04 |
| IgG2b | 1.03 |
| IgG3 | 1.02 |
| 22B8.B1 | 0.89 |

TABLE 4
TREM2 Antibody EC50s on human TREM2-expressing HEK cells

| Antibody | Cell | | STREM2 |
|---|---|---|---|
| Clone ID | binding (nM) | pSyk (nM) | decrease (nM) |
| RS9.F6 | 1.62 | 15.87 | 0.3 |
| RS9.F10 | 1.54 | 20.50 | N.D. |
| 49H11.B1 | N.D. | 26.48 | N.D. |
| 24B4.A1 | 7.5 | 49.78 | N.D. |
| 54C2 | 4.09 | 455.6 | N.D. |

[0604] Additional data is shown in FIG. 3C, which confirms that non-agonists 21D11 and 21D4 do not induce p-Syk. These data were generated as follows. Two days in advance of the experiment, HEK293 cells stably overexpressing TREM2 and DAP12 were plated at 40,000 cells/well on a 96 well poly-D-lysine-coated plate. In PAM experiments utilizing lipid vesicles, the lipid vesicles (see protocol below) were then mixed with the antibodies (at a constant concentration) on a 96-well plate using a Hamilton Nimbus liquid handler at a liposome concentration of 0, liposome EC20, EC50, or EC80 (see below) in PBS. In agonist experiments alone (no liposomes), antibodies were diluted without liposomes in PBS. The cells were washed 3× with HBSS with a Biotek 405/406 plate washer, then 50 μL of the liposome/antibody mixture was added per well using a Hamilton Nimbus liquid handler. The cell plate containing the liposome/antibodies was then transferred to a 37° C. incubator for 5 minutes. The liposome/antibody solution was removed by flicking the plate, and 40 μL lysis buffer (Cell Signaling Technologies, CST) was added using the liquid handler. The lysate was incubated at 4° C. for 30 minutes, then either frozen at −80° C. or immediately carried forward to the alpha-LISA assay as described above.

### Soluble TREM2 (TREM2 Shedding) Assay

[0605] HEK293 cells stably expressing human TREM2 and DAP12 were plated onto 96-well plates pre-coated with poly-D-lysine 4-16 hours prior to antibody treatment. Antibody supernatants or control antibodies were diluted into fresh complete media and added onto cells in triplicate. Cells were incubated with antibody containing media for 18 hours prior to removal of the cell supernatant for assay by TREM2 ELISA. Samples and standards were diluted 1:10 into blocking buffer (3% BSA/TBST) in the assay plate. Briefly, MSD small spot streptavidin plates were coated with biotinylated anti-hTREM2 polyclonal antibody (R&D Systems) overnight at 4° C. or 1 hour at room temperature. Plates were then blocked overnight at 4° C., or 1 hour at room temperature, with blocking buffer, 3% BSA/TBST. Plates were washed three times with TBST in a Biotek plate washer (used for all washes) prior to addition of diluent (blocking buffer) and denatured supernatants from cell culture. A TREM2-His protein diluted in 3% BSA/TBST was used as a standard for absolute quantification. Following 1 hour incubation at room temperature, plates were washed with TBST. The primary detection antibody, sulfo-tagged goat anti-human TREM2 (R&D Systems), diluted in 3% BSA/TBST was added and incubated for 1 hour at room temperature. After washing with TBST, MSD plates were developed using 2×MSD read buffer T, followed by detection using an MSD Sector plate reader. MSD values were converted to absolute quantities of sTREM2 by fitting a standard curve using Prism 7.0 software (Graphpad). Modulation of TREM2 shedding was represented as a ratio to cells cultured with no specific TREM2 antibody in the media. Results from the TREM2 shedding assay are shown in FIG. 4. As shown in FIG. 4, 42E8 defines a class of antibody that blocks TREM2 shedding, while 21D4 defines a class of antibody that enhances TREM2 shedding.

Positive Allosteric Modulator (PAM) and Single Point pSyk Screen

[0606] Two days in advance of the experiment, HEK293 cells stably overexpressing TREM2 and DAP12 were plated at 40,000 cells/well on a 96 well poly-D-lysine-coated plate. The lipid vesicles (see protocol below) were then mixed with the antibodies on a 96-well plate using a Hamilton Nimbus liquid handler at a concentration of 0, EC20, EC50, or EC80 (see below). The cells were washed 3× with HBSS with a Biotek 405/406 plate washer, then 50 μL of the liposome/antibody mixture was added per well using a Hamilton Nimbus liquid handler. The cell plate containing the liposome/antibodies was then transferred to a 37° C. incubator for 5 minutes. The liposome/antibody solution was removed by flicking the plate, and 40 μL lysis buffer (Cell Signaling Technologies, CST) was added using the liquid handler. The lysate was incubated at 4° C. for 30 minutes, then either frozen at −80° C. or immediately carried forward to the alpha-LISA assay as described above.

Liposome Formation and Titration to Determine EC20, EC50, and EC80 of Liposome-Mediated pSyk Activity on TREM2/DAP12-Overexpressing Cells

[0607] Liposomes were prepared on the same day as the experiment as follows: 7 mg DOPC (1,2-dioleoyl-sn-glycero-3-phosphocholine) and 3 mg POPS (1-palmitoyl-2-oleoyl-sn-glycero-3-phospho-L-serine) were combined in chloroform in a glass vial and dried under a stream of N2 gas for 1-2 hours, or until completely dry. The lipid mixture was resuspended in 1 mL HBSS (10 mg/mL final lipid concentration) and vortexed for 2-3 minutes. Subsequently, the lipid suspension was extruded 29 times using an Avanti mini-extruder constructed with one 100 nm pore size membrane to form small unilamellar vesicles at 10 mg/mL.

[0608] Liposome EC20, EC50, and EC80 were determined separately by titrating liposomes starting at 6 mg/mL (calculated using the mole-percent weighted average of the molecular weights, which is equal to 793 g/mol), down to 0.00157 mg/mL in a ten point dilution curve. The liposomes were diluted in HBSS, and 50 μL of liposome solution was added per well to TREM2/DAP12-overexpressing cells using the Hamilton Nimbus liquid handler as in the above protocol. The cells were incubated for 5 minutes, then lysed in 40 μL CST lysis buffer, incubated 30 minutes at 4° C., then either frozen at −80° C. or carried forward to the alpha-LISA assay. The pSyk response was measured as described above from 10 μL lysate, and the curve fit using a non-linear regression (4 parameter dose response) fit in Prism. The determined EC20 was 0.046 mg/mL, EC50 was 0.212 mg/mL, and EC80 was 0.967 mg/mL.

### Human Macrophage Chemotaxis Assay

[0609] Human monocytes are isolated following the RosetteSep human monocyte enrichment cocktail protocol (Stemcell Technologies, Cat #15068). Isolated monocytes are washed in wash buffer (PBS+2% FBS) and resuspended in 10 mL ACK lysis solution to lyse red blood cells. 20 mL wash buffer is added to stop the ACK lysis, then the sample is centrifuged and washed one more time with culture media (RPMI1640+10% FBS+P/S). Cells are resuspended in culture media at density of 1 million/mL and differentiated to macrophages in the presence of human MCSF (50 ng/mL, Gibco, Cat # PHC9501) in 125 mL flask (25 million/flask). Fresh human M-CSF are spiked at day 3. Human macrophages are harvested at day 5 and washed with migration assay buffer (RPMI, no phenol red +0.1% BSA). After washing, cells are resuspended in assay buffer at a density of 1,000,000 cells/mL and labeled with 1.33 μM calcein AM fluorescent dye (Coming, cat. #354217) for 45 minutes in a cell culture incubator. Following incubation, cells are washed once with assay buffer and resuspended in assay buffer at a density of 1,000,000/mL. Human macrophage chemotaxis assay is performed using a Corning FluoroBlok 24-Multiwell insert system (Corning, cat #351158). Labeled cell suspension is added onto inserts (100 μl/well) and set aside. In a separate 24-well plate, 650 μL of chemoattractant C5a (1 ng/mL) is added. The multiwell insert containing cells is gently lowered into the plate containing chemoattractants and immediately placed into a bottom fluorescence plate reader at 485/530 nm (Ex/Em) wavelength (BioTeck, SYNERGY microplate reader). Fluorescence emitted from cells that have migrated to the bottom surface of the insert is measured at various time points.

[0610] Phagocytosis Assay

[0611] Phagocytosis assays using pHrodo™Red-labeled myelin preparation can be used to examine the phagocytic activity of human and mouse primary microglia, macrophages or macrophage/microglia cell lines (such as THP-1 and ECO20 respectively). Briefly, phagocytic cells are plated on 96-well plates. The cell is pre-treated with antibody (or left untreated for a negative control, or treated with control reagents), the proper amount of labeled substrate is added to the cells, and the cells are incubated at 37° C. for 2 to 6 hours. The phagocytosis activity is measured by Opera Phenix High-Content Screening System (PerkinElmer).

### Cell Survival Assay

[0612] Previous studies have indicated that TREM2 plays a critical role in macrophage differentiation and survival (Wu et al., J. Exp. Med., 2009, 212:681-697). Recent studies using microglia cells from wild-type and TREM2 knockout mice showed that the microglia from the knockout mice had cell survival deficits (Zheng et al., J Neurosci, 2017, 37:1772-1784). TREM2 can support microglia energy homeostasis (Ulland et al., Cell, 2017, 170:649-663). The studies using TREM2 knockout mice suggest TREM2 is necessary for myeloid cell survival. To understand if enhancing TREM2 activity with TREM2 agonistic antibodies is sufficient for macrophage/microglia survival under limited M-CSF conditions, human macrophage differentiation and survival studies were performed using antibodies as described herein. Human monocytes isolated from peripheral blood were incubated with 5 ng/mL M-CSF in the presence of titrated concentrations of plate coated TREM2 antibodies or isotype controls. On day 6 cell viability was determined by CellTiter Glo viability assay. As shown in FIGS. 5A-B, anti-TREM2 antibodies, such as the anti-TREM2 agonistic antibodies RS9.F6, 54C2.A1, 24B4.A1, and 19F10.F3, increased the survival of human macrophages cultured in restricted or no M-CSF.

[0613] Western and AlphaScreen assays can be used to look at the activation of the signaling components in cell survival pathways, pS9-GSK3beta, pT374-AKT and p-Erk. For these assays, monocytes are isolated from human blood cells and plated at 100,000 cells per well in a 96-well cell culture plate with RPMI-1640 medium containing 10% hyclone FBS, antibiotics and 50 ng/mL M-CSF, and the macrophages are differentiated from human monocytes. On day 6 of differentiation, cells are treated under M-CSF withdrawal for 4-6 hours. Anti-TREM2 antibodies and the proper IgG isotype controls, are added to the cell at proper concentration, respectively, and incubated in at 37° C. for 5 minutes. Media is removed rapidly, plates are placed on ice and washed with 200 μL of ice cold TBS, and the solution is completely removed. Cells are lysed with 40-50 μL of Cell Lysate Buffer, shaking at 4° C. for 1 hour. Lysates can be stored at −80° C. AlphaScreen kits from PerkinElmer and pS9-GSK3beta, pT374-AKT and p-Erk can be used to measure phosphorylation according the manufacturer's instructions.

[0614] Anti-TREM2 antibodies were characterized for activation of several signaling pathways, SYK, ERK1/2, AKT and GSK3-beta. Human macrophages differentiated from peripheral monocytes were plated in 96-well plates at a density of 100,000 cell/well. The assay was tested in three conditions (0%, 0.5%, and 10% FBS in the media) for 3 hours. Cells were stimulated with the antibody RS9.F6, 24B4.A1, 8A11.B1, 3D3.A1, 54C2.A1, isotype control IgG2ak, rat anti-TREM2 from R&D, isotype control rat IgG2b, or no treatment (NT) for 15 minutes. The cell lysates were measured for p-Y525/526-SYK, p-T202/Y204-ERK1/2, p-S9-GSK3-beta, and p-S473-AKT using Alpha-LISA kits (Perkin Elmer). As shown in FIGS. 6A, 6B, and 6D, RS9.F6, 24B4.A1, 3D3.A1, 54C2.A1 and rat-anti-TREM2 antibodies induced robust p-SYK and pERK1/2 signal. The antibodies stimulated p-GSK signal moderately (FIG. 6C).

[0615] A summary of the cell binding characteristics, activation of pSyk, change in sTREM2 levels, and interaction with lipid ligand to activate pSyk for anti-TREM2 antibodies as described herein is shown in Table 5 below.

TABLE 5
Summary of TREM2 Antibodies

| | Cell Binding | | | | | | | | |
|---|---|---|---|---|---|---|---|---|---|
| | Human | Primary | | Mouse | | | | With Liposomes | |
| | TREM2 | Human | Primary | TREM2 | Primary | | | Additive | Inhibitory |
| Clone ID | HEK | Macrophage | Cyno | HEK | Mouse | pSyk | STREM2 | pSyk | pSyk |
| RS9.F10 | X | X | X | X | X | ++ | NC | X | |
| RS9.F6 | X | X | X | X | X | ++ | NC | X | |
| RS8.13B11.A1 | X | X | N.D. | | N.D. | ++ | | | X |
| RS8.21D4.D1 | X | X | N.D. | | N.D. | | ++ | | XX |
| RS8.22B8.B1 | X | X | N.D. | | N.D. | | | X | |
| RS8.3D3.A1 | X | X | N.D. | X | N.D. | ++ | NC | X | |
| RS8.42E8.H1 | X | X | N.D. | | N.D. | + | −− | X | |
| RS8.43E9.H1 | X | X | N.D. | X | N.D. | ++ | | X | |
| RS8.30A8.A1 | X | X | N.D. | | N.D. | ++ | | | X |
| RS8.21D6.G2 | X | X | N.D. | X | N.D. | + | | X | |
| RS8.57D7.A1 | X | X | N.D. | | N.D. | + | | | X |
| RS8.59C6.F1 | X | X | N.D. | | N.D. | | | X | |
| RS8.53H11.D3 | X | X | N.D. | | N.D. | ++ | | X | |
| RS8.60A4.B1 | X | X | N.D. | | N.D. | ++ | | X | |
| RS8.24B4.A1 | X | X | N.D. | | N.D. | ++ | NC | | X |
| RS8.39H10.A1 | X | X | N.D. | | N.D. | ++ | | | X |
| RS8.55B9.A1 | X | X | N.D. | | N.D. | ++ | | | X |
| RS8.26E2.A3 | X | X | N.D. | | N.D. | ++ | | X | |
| RS8.54C2.A1 | X | X | N.D. | | N.D. | ++ | NC | X | |
| RS8.44E2.H1 | X | X | N.D. | | N.D. | ++ | | X | |
| RS8.22G9.D1 | X | X | N.D. | | N.D. | + | | X | |
| RS8.14H11.A1 | X | X | N.D. | | N.D. | ++ | | | X |
| RS8.49H11.B1 | X | X | N.D. | | N.D. | ++ | | X | |
| RS8.40H3.A4 | X | | N.D. | | N.D. | | | | X |
| RS8.14D5.F1 | X | | N.D. | | N.D. | | | X | |
| RS8.26D11.B1 | | | N.D. | | N.D. | | | X | |
| RS8.52H9.D1 | N.D. | N.D. | N.D. | N.D. | N.D. | +++ | | X | |
| RS8.8A11.B1 | | X | N.D. | | N.D. | | NC | X | |
| RS8.7B10.A2 | N.D. | N.D. | N.D. | N.D. | N.D. | ++ | | X | |
| RS8.19F10.F3 | | X | N.D. | | N.D. | | | X | |
| RS8.30F2.A2 | X | | N.D. | | N.D. | | | | X |
| RS8.51D4.A1 | X | | N.D. | | N.D. | | | | X |
| RS8.26D2.D1 | X | | N.D. | | N.D. | + | NC | | X |
| RS8.21D11.B1 | X | | N.D. | | N.D. | | NC | | X |
| RS8.44E3.B1 | X | | N.D. | | N.D. | | NC | | X |
| RS8.26D5.A1 | X | | N.D. | | N.D. | | | | X |
| RS8.38E9.E5 | X | | N.D. | | N.D. | ++ | | | X |
| RS9.E2 | | | N.D. | | N.D. | + | | | X |
| RS8.2G4.B1 | | | N.D. | | N.D. | ++ | | | X |

N.D. = Not determined
* In cell binding columns, blank indicates no cell binding
** In pSyk column, blank indicates no effect with a cutoff of 5X above background
*** In sTREM2 column, the following legend is used: NC = no change; −− = reduced sTREM2; ++ = increased sTREM2

### Example 2. Hybridoma Sequencing

[0616] Total RNA was extracted from approximately 5×10⁶ hybridoma cells producing each antibody using Qiagen RNeasy Mini Kit (Qiagen). The first-stranded cDNA was synthesized using the SMART RACE cDNA Amplification Kit (BD Biosciences Clontech) following the supplier's protocol. The variable region cDNAs for the heavy and light chains were amplified by polymerase chain reaction (PCR) using 3′ primers that anneal respectively to the mouse gamma and kappa chain C regions (sequences listed below), and a 5′ universal primer provided in the SMART RACE cDNA Amplification Kit.

[0617] For VH PCR, the 3′ primers were as follows:

| (SEQ ID NO: 301) | |
|---|---|
| muIgG1: | GGACAGGGATCCAGAGTTCC |
| (SEQ ID NO: 302) | |
| muIgG2: | AGCTGGGAAGGTGTGCACAC |
| (SEQ ID NO: 303) | |
| muIgG3: | CAGGGGCCAGTGGATAGAC |

[0618] For VL PCR, the 3′ primers were as follows:

| (SEQ ID NO: 304) | |
|---|---|
| muCkappa.1: | GACATTGATGTCTTTGGGGT |
| (SEQ ID NO: 305) | |
| muCkappa.2: | TTCACTGCCATCAATCTTCC |

[0619] The PCR products were separated by agarose gel electrophoresis. The DNA fragments corresponding to VH and VL genes were purified by QIA quick Gel Extraction Kit (Qiagen), and subcloned into the pCRII-TOPO vector using TOPO TA cloning kit (Invitrogen). Each successful clone was sequenced by Sanger sequencing and at least 8 clones were sequenced for each sample.

[0620] Heavy chain sequences, light chain sequences, and CDR sequences for sequenced antibodies are shown in Table 15 below.

### Example 3. Epitope Binning and Epitope Mapping for Anti-TREM2 Antibodies

### Epitope Binning

[0621] Limiting amounts (0.25 ng/mL) of TREM2-Fc proteins were coated onto high-binding polystyrene 96 well plates (e.g., Coming 3690). Plates were subsequently blocked by filling with Tris-buffered saline (10 mM, Tris, pH 7.5, 150 mM NaCl) supplemented with 0.05% Tween 20 and 3% bovine serum albumin (3% BSA-TBST); all subsequent antibody dilutions were in 3% BSA-TBST. Wells were washed five times with TBST. Wells were incubated simultaneously with test antibodies (10 μg/ml) and biotinylated probe antibody (0.25-1 ng/mL) for 1 hour at room temperature. After washing (5×TBST), wells were incubated with streptavidin-horseradish peroxidease conjugate for 1 hour at room temperature. After washing (5×TBST) and removal of residual buffer, plates were developed for ˜1-2 minutes by the addition of TMB substrate before stopping by the addition of 2N sulfuric acid. Absorbance at 450 nm was determined using a Perkin Elmer Envision plate reader. Binding competition was determined as a percentage reduction in probe antibody binding in the presence of competitor antibody compared to the absence of competitor antibody. Epitope bins were determined by computing relative competition binding across several different antibody probes. In FIG. 7, antibodies are shown clustered by similar epitope. Clustering was computed using Cytoscape version 3.5.1.

### FACS Binning on Human TREM2-HEK Cell Lines

[0622] HEK293 overexpressing human TREM2 (H6) were harvested by 0.05% trypsin and incubated at 37° C. incubator for 2 hours for surface TREM2 recovery. After incubation, cells were washed with 1×PBS and FACS buffer (PBS+0.5% BSA) with human Trustain FcX solution (Biolegend, Cat #422302) was added at a density of 10⁶/mL. Cells were seeded at 100,000 cells per well in a 96-well round-bottom and incubated 20 minutes at room temperature. After incubation, anti-TREM2 antibodies (100 nM) were added to the cells and the cells were incubated for 45 minutes on ice. After incubation, rat anti-h/mTREM2-APC antibody (1:100, R&D, Cat # FAB17291A) was added to the cells, and the cells were incubated for 30 minutes on ice. After incubation, cells were washed with FACS buffer three times and resuspended in 10 μL FACS buffer, then analyzed by flow cytometry (BD FACSCanto II, San Jose, Calif.). 20,000 events were obtained for each sample. The ability to compete with R&D antibody was determined by MFI analysis compared to isotype or buffer control wells. The results of the FACS binning are shown in Table 6 below.

### Octet Binning of Anti-TREM2 Antibodies

[0623] Competition with R&D antibody was done by Octet Red using biotinylated human Trem2-His protein generated in house. Biotinylated human TREM2-His protein was captured on a streptavidin tip, and the tip was then incubated in either 100 nM of R&D Ab or buffer for 3 minutes, followed by incubation for 3 minutes in 100 nM of testing hybridoma. The difference of hybridoma binding curve with or without pre-binding to R&D antibody was analyzed to determine the epitope. The results of the Octet binning are shown in Table 6 below.

TABLE 6
Epitope binning by FACS and Octet

| Clone ID | Bin by FACS | Bin by Octet |
|---|---|---|
| RS9.F6 | 2 | 2 |
| 3D3.A1 | 3 | 3 |
| 24B4.A1 | 1 | 1 |
| 54C2.A1 | 1 | 1 |
| 42E8.H1 | 1 | 1 |
| 21D4.D1 | 1 | 1-2 |
| 30F2 | 1-2 | 1-2 |
| 51D4 | 1-2 | 1-2 |
| 21D11 | 1-2 | 1-2 |
| 26D2 | 3 | 1-2 |
| 14H11.A1 | 1-2 | 1 |
| 26D5 | 1-2 | 1-2 |
| 2G4.B1 | 1-2 | N.D. |
| RS9.E2 | 1-2 | 1 |
| 49H11.B1 | 1 | 1 |
| 57D7.A1 | 1-2 | 1 |

N.D. = not determined

### Epitope Mapping Using Peptide Microarrays

[0624] The human TREM2 (SEQ ID NO:96; UniprotKB accession number Q9NZC2) extracellular domain was divided into 15 amino acid peptides, offset by 5 amino acids (overlapping by 10 amino acids). Peptides were synthesized and covalently attached to silica slides in triplicate with a spot size of 0.5 mm (JPT Technologies, Berlin, Germany). Antibodies were diluted to 30 μg/mL in 3% bovine serum albumin in Tris-buffered saline (10 mM, Tris, pH 7.5, 150 mM NaCl) supplemented with 0.05% Tween 20 (3% BSA-TBST). Diluted antibodies were allowed to bind to peptides printed onto slides for 2 hours at room temperature as described in the Pepstar user manual (JPT). Following extensive washing (5×5 min TBST), slides were incubated with secondary antibodies (donkey anti-mouse IgG, Alexafluor 647 conjugate, 5 μg/mL in 3% BSA-TBST) for 1 hour at room temperature. After extensive washing, (5×5 min TBST, 5×5 min ultrapure water), slides were dried under nitrogen and imaged on the Opera Phenix in the 647 nm channel. Images were aligned to peptide array definition file (galviewer, JPT) using ImageJ with control mouse IgG serving as landmarks. The results of the epitope mapping are shown in Table 7 below.

TABLE 7
Epitope mapping of anti-TREM2 antibodies

| Antibody | Tiled TREM2 peptides | | | | | |
|---|---|---|---|---|---|---|
| 42E8.H1 | 24-43 | | | 94-108 | 124-153 | |
| 3D3.A1 | | | | | 134-153 | 159-174 |
| 21D4.D1 | N.D. | | | | | |
| 49H11.B1 | N.D. | | | | | |
| RS9.F10 | | | | | 129-153 | |
| 24B4.A1 | N.D. | | | | | |
| 54C2.A1 | | | 64-78 | 89-103 | 129-143 | |
| 57D7.A1 | | 44-58 | 74-88 | | 134-148 | |
| RS9.F6 | | 44-58 | | 94-108 | 129-153 | |
| RS9.E2 | | 44-58 | | | | |
| 2G4 | N.D. | | | | | |
| 30F2 | | | 64-78 | | | |
| 26D2 | | 44-58 | 64-78 | | | |
| 21D11 | | 44-58 | 64-78 | | | |
| 51D4 | | 44-58 | 64-78 | | | |
| 21D5 | | 44-58 | | 89-108 | | |

N.D. = not determined

### Example 4. Screen for Novel TREM2-pSyk Activating Lipids

[0625] Lipids are physiological ligands for TREM2. Understanding the potential endogenous lipid ligands for TREM2, such as the endogenous lipid ligands in specific cell or tissue types or in specific disease states, enables analysis of antibody-lipid biological interactions and prediction of function in vivo. A screen was conducted to identify lipid ligands that induce p-Syk in HEK cells expressing wild-type TREM2 and DAP12, mutant TREM2 and DAP12, or DAP12 alone, as well as macrophage cells that endogenously express TREM2. Selected anti-TREM2 antibodies were also tested to characterize the interaction of the antibodies with lipid ligand to activate p-Syk.

### Liposome Preparation

[0626] Lipids were purchased from Avanti Polar Lipids (Alabaster, Ala.) or Echelon Biosciences (Salt Lake City, Utah). Each screened lipid was resuspended in chloroform and added at 30 mole percent composition to 70 mole percent phosphatidylcholine (PC; 1,2-dioleoyl-sn-glycero-3-phosphocholine, Avanti Polar Lipids). Kdo2-Lipid A was added at a 10 mole percent composition with 90 mole percent PC. Lipid mixes were dried under nitrogen gas and resuspended in HBSS at a concentration of 4 mg/mL. Mixes were vortexed or briefly sonicated until resuspended, then bath sonicated for 1-5 minutes. Liposomes were used for 1-2 weeks. 3 independent batches of liposomes were used in experiments.

### HEK293 Overexpressing Cell Line Culture

[0627] HEK293 cell lines overexpressing TREM2 and DAP12, mutant TREM2-R47H and DAP12, or DAP12 alone were plated in 96-well PDL-coated plates at a density of 40,000 cells per well and cultured for 36-48 hours until 90-100% confluent.

### Human Macrophage Differentiation Culture

[0628] 10 mL human blood was obtained from Blood Centers of the Pacific. Monocytes were extracted using RosetteSep Human Monocyte Enrichment Cocktail (STEMCELL Technologies Inc.; Vancouver, BC; #15068) as per manufacturer protocols. Density gradient was performed with Ficoll-Paque Premium (GE Healthcare Life Sciences; Pittsburgh, Pa.; #17-5442-02). Isolated monocytes were resuspended at ˜1-1.3 million cells/mL and cultured for 5-6 days in RPMI, 10% Hyclone Fetal Bovine Serum, and penicillin/streptomycin supplemented with 50 ng/mL human M-CSF (Gibco, # PHC9501) in T175 tissue culture treated flasks. M-CSF was replenished every 2-3 days. Cells were washed once with PBS, 15 mL fresh medium was added, and cells were harvested by scraping. Cells were cultured overnight at a density of 100,000 cells per well on tissue culture treated 96-well plates supplemented with 10-25 ng/mL M-CSF.

### Liposome Stimulation Assay for HEK293 Overexpressing Cell Lines and Human Macrophages

[0629] Cell culture medium was removed and cells were washed once with 200ul HBSS. Liposomes were diluted in HBSS in concentrations ranging from 0.03125 mg/mL to 2 mg/mL, then 50 μl was added to wells in 2-3 technical replicates per plate. Each plate contained HBSS negative control wells, 100% PC liposome control, 5 μg/mL agonist anti-TREM2 positive control (Abnova; Taiwan; # MAB2056), and 5 μg/mL mouse IgG3 isotype control (R&D Systems; Minneapolis, Minn.; # MAB007). Stimuli were incubated with cells for 5 minutes at 37° C., 5% CO₂, liposomes were removed, and plates were frozen at −80° C.

### Phosphorylated-Syk Assay for HEK293 Overexpressing Cell Lines and Human Macrophages

[0630] Cells were lysed for 30 minutes to 1 hour on ice in 50 ul/well Cell Lysis Buffer (Cell Signaling Technology; Danvers, Mass.; #9803) with 1 mM PMSF. AlphaLISA SureFire Ultra p-Syk Tyr525/526 assay kit (PerkinElmer, ALSU-PSYK-A10OK) was used to measure pSyk levels in lysate as per manufacturer protocol. 10 μl lysate was added to 384-well OptiPlates (PerkinElmer; #6007290) and an EnVision Multilabel Plate Reader (PerkinElmer) was used to measure AlphaLISA fluorescence.

### Liposome Screen Analysis

[0631] PSyk AlphaLISA fluorescence was converted to a log 2 scale. Fluorescence values from liposomes and controls were each subtracted from average fluorescence values from HBSS stimulated wells on the same plate (log 2(liposome)−log 2(HBSSave)=log 2(signal)). The result was converted back to a standard scale to measure fold change (2^{log 2(signal)}=fold change). Technical replicate fold changes values were averaged to obtain the fold change over background listed (pSyk FOB). Graphs represent values from independent experiments or individual human donors. Results from the screen on the HEK293 overexpressing cell lines are shown in Table 9 below and in FIG. 8A-8B. Results from the screen on primary human macrophages are shown in Table 10 below and in FIG. 8C. HEK293 results showing specificity for TREM2 over DAP12 expressed alone can be used to extrapolate which lipid species are likely acting as TREM2 ligands on human macrophages. PAHSA, KLA, CL, C1P, BMP, PI, PS, LPE, and GalCer likely signal via TREM2 because pSyk levels are elevated above DAP12 control cells, whereas PA, So1P, and GlcSo may not signal through TREM2. FIG. 9A shows the characterization of selected anti-TREM2 antibodies' interaction with lipid ligand to activate p-Syk. As shown in FIG. 9A, 21D6.G2 and 3D3.A1 define a class of TREM2 antibody that act as additive with lipid TREM2 activators. 21D4.D1 defines a class of TREM2 antibody that alone induce pSyk signaling yet block lipid ligand activation of TREM2.

### TREM2 PAM/pSyk Assay on Human Macrophages

[0632] Human macrophages were differentiated from donor blood using a human monocyte enrichment cocktail (Stem Cell Technologies) and culturing monocytes with human mCSF for five days in macrophage media (RPMI+10% Hyclone FBS+Glutamax+Pen/Strep+non-essential amino acids+sodium pyruvate). On the fifth day, the human macrophages were scraped from the flasks and were re-plated at 100,000 cells/well on a 96-well poly-D-lysine-coated plate in the macrophage media (without mCSF). The cells were incubated for 24 hours to adhere, then the media was removed.

[0633] Antibodies pre-mixed with lipid vesicles comprised of 70% DOPC and 30% POPS (made according to the procedure for making vesicles described above) diluted in HBSS were immediately added to the cells, and allowed to incubate for 5 minutes at 37° C. The liposome/antibody solution was removed, and 35 μL lysis buffer (Cell Signaling Technologies, CST) was added using the liquid handler. The lysate was then incubated at 4° C. for 30 minutes, then either frozen at −80° C. or immediately carried forward to a pSyk AlphaLISA assay as described above. The signal due to liposomes alone was subtracted at each value to determine if the antibodies had a synergistic, neutral, or inhibitor effect on lipid ligand driven pSyk activation. The results of the assay are shown in FIG. 9B and in Table 8 below. 52H9.D1 and 7B10.A2 define a class of TREM2 antibody that act as synergistic with lipid TREM2 activators. RS9.F6 and 3D3.A1 define a class of TREM2 antibody that have at least an additive effect on lipid ligand activation of TREM2. 21D4.D1 defines a class of TREM2 antibody that has an inhibitor effect on lipid ligand activation of TREM2.

TABLE 8
Induction of pSyk in the presence of TREM2 lipid ligand

| Antibody | Slope + Liposome |
|---|---|
| 52H9.D1 | 13,314 |
| 7B10.A2 | 5,370 |
| RS9.F6 | 878 |
| 3D3.A1 | 94 |
| 21D4.D1 | −1.632 |
| abnova | 700 |
| RnD | −269 |
| IgG2a | 366 |

TREM2 pSyk Antagonist Assay

[0634] Human macrophages were differentiated from donor blood using a human monocyte enrichment cocktail (Stem Cell Technologies) and culturing monocytes with human mCSF for five days in macrophage media (RPMI+10% Hyclone FBS+Glutamax+Pen/Strep+non-essential amino acids+sodium pyruvate). On the fifth day, the human macrophages were scraped from the flasks and were re-plated at 100,000 cells/well on a 96-well poly-D-lysine-coated plate in the macrophage media (without mCSF). The cells were incubated for 24 hours to adhere, then the media was removed.

[0635] Antibodies diluted in RPMI alone were immediately added to the cells, and allowed to incubate for 30 minutes at 37° C. The antibodies were then removed. Lipid vesicles comprised of 70% DOPC and 30% POPS (made according to the procedure for making vesicles described above) in HBSS were added to the cells and incubated for minutes at 37° C. The liposome/antibody solution was removed, and 35 μL lysis buffer (Cell Signaling Technologies, CST) was added using the liquid handler. The lysate was then incubated at 4° C. for 30 minutes, then either frozen at −80° C. or immediately carried forward to a pSyk AlphaLISA assay as described above. The signal due to liposomes alone was subtracted at each value to determine if the antibodies had a synergistic, neutral, or inhibitor effect on lipid ligand driven pSyk activation. The results of the assay are shown in FIGS. 9C-9D. As shown in FIGS. 9C and 9D, 51D4.A1, 30F2.A2, 21D11.B1, and 26D2.D1 all blocked liposome mediated pSyk signaling, and 54C2.A1, 22B8.B1, and 26E2.A3 all enhanced liposome mediated pSyk signaling.

[0636] FIG. 9E shows inhibition of liposome mediated pSyk by 21D4 and 21D11. These experiments were performed as follows. Two days in advance of the experiment, HEK293 cells stably overexpressing TREM2 and DAP12 were plated at 40,000 cells/well on a 96 well poly-D-lysine-coated plate. Antibodies diluted in DMEM alone were immediately added to the cells, and allowed to incubate for 30 minutes at 37° C. The antibodies were then removed. Lipid vesicles comprised of 70% DOPC and 30% POPS at their EC20, EC50, or EC80, or PBS alone, were added to the cells and incubated for 5 minutes at 37° C. The liposome/antibody solution was removed, and 35 μL lysis buffer (Cell Signaling Technologies, CST) was added using the liquid handler. The lysate was then incubated at 4° C. for 30 minutes, then either frozen at −80° C. or immediately carried forward to a pSyk AlphaLISA assay as described above. The percent inhibition was calculated as in FIG. 9C.

[0637] FIGS. 9F and 9G show inhibition by 21D4 and 21D11, respectively, at increasing antibody concentrations. These experiments were performed similarly to those described in FIG. 9E. These figures show that 21D4 exhibited antagonistic activity and 21D11 exhibited weaker antagonistic activity.

TABLE 9
Novel TREM2-pSyk activating lipids identified
from screen on HEK overexpressing cell lines

| | Human | R47H TREM2 | |
|---|---|---|---|
| | TREM2 | mutant | DAP12 alone |
| Lipid | (pSyk FOB) | (pSyk FOB) | (pSyk FOB) |
| Palmitic-acid-9-hydroxy-stearic- | 5.87 | 7.31 | 1.27 |
| acid (PAHSA) | | | |
| Ganglioside GM3 | 5.82 | 6.05 | 1.14 |
| 27-hydroxycholesterol (27OHC) | 5.26 | 9.25 | 1.36 |
| Kdo2-Lipid A (KLA) | 5.15 | 6.65 | 1.25 |
| Sulfatide | 5.02 | 6.34 | 1.21 |
| Ganglioside GM1 | 4.94 | 4.93 | 0.92 |
| Bis(monoacylglycero)phosphate | 4.85 | 3.04 | 1.42 |
| (BMP) | | | |
| Lysophosphatidylglycerol (LPG) | 4.83 | 3.44 | 1.28 |
| 24(S)hydroxycholesterol (24OHC) | 4.50 | 8.44 | 1.57 |
| Phosphatidylinositol (PI) | 4.31 | 2.27 | 1.04 |
| Cholesteryl ester (CE) | 4.24 | 10.90 | 1.14 |
| LysophosphatidyLethanolamine (LPE) | 4.16 | 3.58 | 1.28 |
| Ceramide-1-phosphate (C1P) | 3.89 | 4.00 | 1.16 |
| Cardiolipin (CL) | 3.79 | 3.31 | 1.26 |
| Lysophosphatidylserine (LPS) | 3.77 | 3.88 | 1.39 |
| Lysophosphatidic acid (LPA) | 3.69 | 3.62 | 1.17 |
| Galactosylceramide (GalCer) | 3.45 | 4.65 | 1.16 |
| Diacylglycerol pyrophosphate | 3.42 | 3.70 | 1.16 |
| (DGPP) | | | |
| Sphinganine-1-phosphate (SalP) | 3.31 | 5.32 | 1.34 |
| Phosphatidylethanol (PEtOH) | 3.00 | 4.83 | 1.57 |
| Ether phosphatidylcholine (PCe) | 2.94 | 3.97 | 1.33 |
| 25(S)hydroxycholesterol (25OHC) | 2.61 | 6.27 | 1.20 |
| N-Acyl-Serine (NSer) | 2.59 | 3.76 | 1.39 |
| Cholesterol phosphate (CP) | 2.43 | 3.09 | 1.27 |
| Sphingosine-1-phosphate (SolP) | 2.42 | 3.94 | 1.64 |
| Phosphatidylserine (PS) | 2.42 | 2.65 | 1.27 |
| Phosphatidylglycerol (PG) or | 2.25 | 3.77 | 1.40 |
| DSPG | | | |
| Ceramide | 2.20 | 2.21 | 1.30 |
| Phosphatidic acid (PA) | 2.17 | 2.72 | 1.48 |
| 100% Phosphatidylcholine (PC) | 2.01 | 2.27 | 0.86 |
| Lactosylceramide (LacCer) | 1.89 | 2.06 | 1.27 |
| lysoalkylacylglycerophosphocholine | 1.81 | 1.46 | 0.67 |
| (LPAF) | | | |
| Sphingomyelin (SM) | 1.74 | 2.09 | 1.40 |
| Dihydrosphingomyelin (DhSM) | 1.59 | 1.93 | 1.40 |
| alkylacylglycerophosphocholine | 1.58 | 1.41 | 0.69 |
| (PAF) | | | |
| Phosphatidylethanolamine (PE) | 1.49 | 2.49 | 1.51 |
| or DSPE | | | |
| Glucosyl sphingosine (GlcSo) | 1.34 | 1.27 | 1.31 |
| Lysophosphatidylcholine (LPC) | 1.26 | 1.47 | 1.14 |
| Dihyrdoceramide (DhCer) | 1.22 | 1.47 | 0.84 |
| Diacylglycerol 34:1 (DG34:1) | 1.20 | 0.68 | 0.68 |
| Acyl Carnitine (AC) | 1.17 | 1.83 | 1.55 |
| Lysophosphatidylinositol (LPI) | 1.12 | 0.32 | 1.03 |
| Hank's Balanced Salt Solution | 1.10 | 1.12 | 0.96 |
| (HBSS) | | | |
| 7-ketocholesterol (7-KC) | 1.10 | 3.42 | 1.36 |
| Galactosylsphingosine (GalSo) | 1.09 | 1.07 | 0.71 |
| Diacylglycerol 38:4 (DG 38:4) | 1.05 | 0.73 | 0.64 |
| Free cholesterol (FC) | 1.04 | 2.24 | 1.14 |
| 1-palmitoyl-2-(5′-oxo-valeroyl)- | 0.86 | 1.57 | 1.34 |
| sn-glycero-3-phosphocholine (POVPC) | | | |
| Oxidized phosphatidylcholine (oxPC) | 0.81 | 0.68 | 1.26 |
| α-galactosylceramide (KRN7000) | 0.79 | 0.97 | 0.85 |
| Sphinganine | 0.76 | 1.39 | 1.26 |
| 2-Arachidonoylglycerol (2-AG) | 0.68 | 0.84 | 1.11 |
| N-Acyl-phosphatidylethanolamine | 0.67 | 0.94 | 0.78 |
| (NAPE) | | | |
| Lysosphingomyelin (LSM) | 0.67 | 0.85 | 1.03 |
| Sphingosine | 0.67 | 0.85 | 1.32 |

TABLE 10
Novel TREM2-pSyk activating lipids identified
from screen on primary human macrophages

| Lipid | pSyk FOB |
|---|---|
| Palmitic-acid-9-hydroxy-stearic- | 3.94 |
| acid (PAHSA) | |
| Kdo2-Lipid A (KLA) | 2.73 |
| Cardiolipin (CL) | 2.50 |
| Ceramide-1-phosphate (C1P) | 2.28 |
| Bis(monoacylglycero)phosphate (BMP) | 2.19 |
| Phosphatidic acid (PA) | 2.17 |
| Sphingosine-1-phosphate (SolP) | 2.10 |
| Phosphatidylinositol (PI) | 2.09 |
| Phosphatidylserine (PS) | 2.09 |
| Glucosyl sphingosine (GlcSo) | 2.05 |
| Lysophosphatidylethanolamine (LPE) | 2.03 |
| Galactosylceramide (GalCer) | 1.98 |
| Phosphatidylglycerol (PG) or DSPG | 1.85 |
| Lysophosphatidic acid (LPA) | 1.82 |
| Lysophosphatidylserine (LPS) | 1.78 |
| Sulfatide | 1.75 |
| 27-hydroxycholesterol (27OHC) | 1.72 |
| N-Acyl-Serine (NSer) | 1.66 |
| Lysophosphatidylglycerol (LPG) | 1.64 |
| Cholesteryl ester (CE) | 1.62 |
| Diacylglycerol pyrophosphate (DGPP) | 1.61 |
| Lysophosphatidylinositol (LPI) | 1.61 |
| Phosphatidylethanol (PEtOH) | 1.61 |
| Glucosylceramide (GlcCer) | 1.58 |
| 24(S)hydroxycholesterol (24OHC) | 1.56 |
| Phosphatidylethanolamine (PE) or DSPE | 1.53 |
| Ganglioside GM1 | 1.52 |
| Free cholesterol (FC) | 1.44 |
| Ceramide | 1.44 |
| Lactosylceramide (LacCer) | 1.29 |
| Ether phosphatidylcholine (PCe) | 1.29 |
| Lysosphingomyelin (LSM) | 1.26 |
| Oxidized PC | 1.25 |
| 2-Arachidonoylglycerol (2-AG) | 1.23 |
| 7-ketocholesterol (7-KC) | 1.18 |
| Cholesterol phosphate (CP) | 1.18 |
| 100% Phosphatidylcholine (PC) | 1.18 |
| Ganglioside GM3 | 1.17 |
| 25-hydroxycholesterol (25OHC) | 1.14 |
| Sphinganine-1-phosphate (Sa1P) | 1.08 |
| Sphingomyelin (SM) | 1.02 |
| Hank's Balanced Salt Solution (HBSS) | 1.01 |
| Dihydrosphingomyelin (DhSM) | 0.96 |
| Sphingosine | 0.96 |

### Example 5. Modified Fc Polypeptides that Bind to TfR

[0638] This example describes modifications to Fc polypeptides to confer transferrin receptor (TfR) binding and transport across the blood-brain barrier (BBB). Unless otherwise indicated, the positions of amino acid residues in this example are numbered based on EU index numbering for a human IgG1 wild-type Fc region.

### Generation and Characterization of Fc Polypeptides Comprising Modifications at Positions 384, 386, 387, 388, 389, 390, 413, 416, and 421 (CH3C Clones)

[0639] Yeast libraries containing Fc regions having modifications introduced into positions including amino acid positions 384, 386, 387, 388, 389, 390, 413, 416, and 421 were generated as described below. Illustrative clones that bind to TfR are shown in Tables 11 and 12.

[0640] After an additional two rounds of sorting, single clones were sequenced and four unique sequences were identified. These sequences had a conserved Trp at position 388, and all had an aromatic residue (i.e., Trp, Tyr, or His) at position 421. There was a great deal of diversity at other positions. The four clones selected from the library were expressed as Fc fusions to Fab fragments in CHO or 293 cells, and purified by Protein A and size-exclusion chromatography, and then screened for binding to human TfR in the presence or absence of holo-Tf by ELISA. The clones all bound to human TfR and the binding was not affected by the addition of excess (5 μM) holo-Tf. Clones were also tested for binding to 293F cells, which endogenously express human TfR. The clones bound to 293F cells, although the overall binding was substantially weaker than the high-affinity positive control.

[0641] Next, it was tested whether clones could internalize in TfR-expressing cells using clone CH3C.3 as a test clone. Adherent HEK 293 cells were grown in 96-well plates to about 80% confluence, media was removed, and samples were added at 1 μM concentrations: clone CH3C.3, anti-TfR benchmark positive control antibody (Ab204), anti-BACE1 benchmark negative control antibody (Ab107), and human IgG isotype control (obtained from Jackson Immunoresearch). The cells were incubated at 37° C. and 8% CO₂ concentration for 30 minutes, then washed, permeabilized with 0.1% Triton™ X-100, and stained with anti-human-IgG-Alexa Fluor® 488 secondary antibody. After additional washing, the cells were imaged under a high content fluorescence microscope (i.e., an Opera Phenix™ system), and the number of puncta per cell was quantified. At 1 M, clone CH3C.3 showed a similar propensity for internalization to the positive anti-TfR control, while the negative controls showed no internalization.

### Further Engineering of Clones

[0642] Additional libraries were generated to improve the affinity of the initial hits against human TfR using a soft randomization approach, wherein DNA oligos were generated to introduce soft mutagenesis based on each of the original four hits. Additional clones were identified that bound TfR and were selected. The selected clones fell into two general sequence groups. Group 1 clones (i.e., clones CH3C.18, CH3C.21, CH3C.25, and CH3C.34) had a semi-conserved Leu at position 384, a Leu or His at position 386, a conserved and a semi-conserved Val at positions 387 and 389, respectively, and a semi-conserved P-T-W motif at positions 413, 416, and 421, respectively. Group 2 clones had a conserved Tyr at position 384, the motif TXWSX at positions 386-390, and the conserved motif S/T-E-F at positions 413, 416, and 421, respectively. Clones CH3C.18 and CH3C.35 were used in additional studies as representative members of each sequence group.

### Epitope Mapping

[0643] To determine whether the engineered Fc regions bound to the apical domain of TfR, TfR apical domain was expressed on the surface of phage. To properly fold and display the apical domain, one of the loops had to be truncated and the sequence needed to be circularly permuted. Clones CH3C.18 and CH3C.35 were coated on ELISA plates and a phage ELISA protocol was followed. Briefly, after washing and blocking with 1% PBSA, dilutions of phage displaying were added and incubated at room temperature for 1 hour. The plates were subsequently washed and anti-M13-HRP was added, and after additional washing the plates were developed with TMB substrate and quenched with 2N H₂SO₄. Both clones CH3C.18 and CH3C.35 bound to the apical domain in this assay.

Paratope mapping

[0644] To understand which residues in the Fc domain were most important for TfR binding, a series of mutant clone CH3C.18 and clone CH3C.35 Fc regions was created in which each mutant had a single position in the TfR binding register mutated back to wild-type. The resulting variants were expressed recombinantly as Fab-Fc fusions and tested for binding to human or cyno TfR. For clone CH3C.35, positions 388 and 421 were important for binding; reversion of either of these to wild-type completely ablated binding to human TfR.

### Binding Characterization of Maturation Clones

[0645] Binding ELISAs were conducted with purified Fab-Fc fusion variants with human or cyno TfR coated on the plate, as described above. The variants from the clone CH3C.18 maturation library, clone CH3C.3.2-1, clone CH3C.3.2-5, and clone CH3C.3.2-19, bound human and cyno TfR with approximately equivalent EC5o values, whereas the parent clones CH3C.18 and CH3C.35 had greater than 10-fold better binding to human versus cyno TfR.

[0646] Next, it was tested whether the modified Fc polypeptides internalized in human and monkey cells. Using the protocol described above, internalization in human HEK 293 cells and rhesus LLC-MK2 cells was tested. The variants that similarly bound human and cyno TfR, clones CH3C.3.2-5 and CH3C.3.2-19, had significantly improved internalization in LLC-MK2 cells as compared with clone CH3C.35.

### Additional Engineering of Clones

[0647] Additional engineering to further affinity mature clones CH3C.18 and CH3C.35 involved adding additional mutations to the positions that enhanced binding through direct interactions, second-shell interactions, or structure stabilization. This was achieved via generation and selection from an “NNK walk” or “NNK patch” library. The NNK walk library involved making one-by-one NNK mutations of residues that are near to the paratope. By looking at the structure of Fc bound to FcγRI (PDB ID: 4W40), 44 residues near the original modification positions were identified as candidates for interrogation. Specifically, the following residues were targeted for NNK mutagenesis: K248, R255, Q342, R344, E345, Q347, T359, K360, N361, Q362, S364, K370, E380, E382, S383, G385, Y391, K392, T393, D399, S400, D401, S403, K409, L410, T411, V412, K414, S415, Q418, Q419, G420, V422, F423, S424, S426, Q438, S440, S442, L443, S444, P4458, G446, and K447. The 44 single point NNK libraries were generated using Kunkel mutagenesis, and the products were pooled and introduced to yeast via electroporation, as described above for other yeast libraries.

[0648] The combination of these mini-libraries (each of which had one position mutated, resulting in 20 variants) generated a small library that was selected using yeast surface display for any positions that lead to higher affinity binding. Selections were performed as described above, using TfR apical domain proteins. After three rounds of sorting, clones from the enriched yeast library were sequenced, and several “hot-spot” positions were identified where certain point mutations significantly improved the binding to apical domain proteins. For clone CH3C.35, these mutations included E380 (mutated to Trp, Tyr, Leu, or Gln) and S415 (mutated to Glu). The sequences of the clone CH3C.35 single and combination mutants are set forth in SEQ ID NOs:100-104 and 160-166. For clone CH3C.18, these mutations included E380 (mutated to Trp, Tyr, or Leu) and K392 (mutated to Gln, Phe, or His). The sequences of the clone CH3C.18 single mutants are set forth in SEQ ID NOs:154-159.

### Additional Maturation Libraries to Improve Clone CH3C.35 Affinity

[0649] An additional library to identify combinations of mutations from the NNK walk library, while adding several additional positions on the periphery of these, was generated as described for previous yeast libraries. In this library, the YxTEWSS (SEQ ID NO:299) and TxxExxxxF (SEQ ID NO:300) motifs were kept constant, and six positions were completely randomized: E380, K392, K414, S415, S424, and S426. Positions E380 and S415 were included because they were “hot spots” in the NNK walk library. Positions K392, S424, and S426 were included because they make up part of the core that may position the binding region, while K414 was selected due to its adjacency to position 415.

[0650] This library was sorted, as previously described, with the cyno TfR apical domain only. The enriched pool was sequenced after five rounds, and the sequences of the modified regions of the identified unique clones are set forth in SEQ ID NOs:105 and 169-185.

[0651] The next libraries were designed to further explore acceptable diversity in the main binding paratope. Each of the original positions (384, 386, 387, 388, 389, 390, 413, 416, and 421) plus the two hot spots (380 and 415) were individually randomized with NNK codons to generate a series of single-position saturation mutagenesis libraries on yeast. In addition, each position was individually reverted to the wild-type residue, and these individual clones were displayed on yeast. It was noted that positions 380, 389, 390, and 415 were the only positions that retained substantial binding to TfR upon reversion to the wild-type residue (some residual but greatly diminished binding was observed for reversion of 413 to wild-type).

[0652] The single-position NNK libraries were sorted for three rounds against the human TfR apical domain to collect the top ˜5% of binders, and then at least 16 clones were sequenced from each library. The results indicate what amino acids at each position can be tolerated without significantly reducing binding to human TfR, in the context of clone CH3C.35. A summary is below:
[0653] Position 380: Trp, Leu, or Glu;
[0654] Position 384: Tyr or Phe;
[0655] Position 386: Thr only;
[0656] Position 387: Glu only;
[0657] Position 388: Trp only;
[0658] Position 389: Ser, Ala, or Val (although the wild type Asn residue seems to retain some binding, it did not appear following library sorting);
[0659] Position 390: Ser or Asn;
[0660] Position 413: Thr or Ser;
[0661] Position 415: Glu or Ser;
[0662] Position 416: Glu only; and
[0663] Position 421: Phe only.

[0664] The above residues, when substituted into clone CH3C.35 as single changes or in combinations, represent paratope diversity that retains binding to TfR apical domain. Clones having mutations at these positions include those shown in Table 12, and the sequences of the CH3 domains of these clones are set forth in SEQ ID NOs:100-136 and 344-350.

Additional Fc Positions that can be Modified to Confer TfR Binding

[0665] Additional modified Fc polypeptides that bind to transferrin receptor (TfR) were generated having modifications at alternative sites in the Fc region, e.g., at the following positions:
[0666] positions 274, 276, 283, 285, 286, 287, 288, and 290 (CH2A2 clones);
[0667] positions 266, 267, 268, 269, 270, 271, 295, 297, 298, and 299 (CH2C clones);
[0668] positions 268, 269, 270, 271, 272, 292, 293, 294, and 300 (CH2D clones);
[0669] positions 272, 274, 276, 322, 324, 326, 329, 330, and 331 (CH2E3 clones); or
[0670] positions 345, 346, 347, 349, 437, 438, 439, and 440 (CH3B clones).

[0671] Illustrative CH3B clones that bind to TfR are set forth in SEQ ID NOs:186-190. Illustrative CH2A2 clones that bind to TfR are set forth in SEQ ID NOs: 191-195. Illustrative CH2C clones that bind to TfR are set forth in SEQ ID NOs:196-200. Illustrative CH2D clones that bind to TfR are set forth in SEQ ID NOs:201-205. Illustrative CH2E3 clones that bind to TfR are set forth in SEQ ID NOs:206-210.

### Methods

### Generation of Phage-Display Libraries

[0672] A DNA template coding for the wild-type human Fc sequence was synthesized and incorporated into a phagemid vector. The phagemid vector contained an ompA or pelB leader sequence, the Fc insert fused to c-Myc and 6xHis epitope tags, and an amber stop codon followed by M13 coat protein pIII.

[0673] Primers containing “NNK” tricodons at the desired positions for modifications were generated, where N is any DNA base (i.e., A, C, G, or T) and K is either G or T. Alternatively, primers for “soft” randomization were used, where a mix of bases corresponding to 70% wild-type base and 10% of each of the other three bases was used for each randomization position. Libraries were generated by performing PCR amplification of fragments of the Fc region corresponding to regions of randomization and then assembled using end primers containing SfiI restriction sites, then digested with SfiI and ligated into the phagemid vectors. Alternatively, the primers were used to conduct Kunkel mutagenesis. The ligated products or Kunkel products were transformed into electrocompetent E. coli cells of strain TG1 (obtained from Lucigen®). The E. coli cells were infected with M13K07 helper phage after recovery and grown overnight, after which library phage were precipitated with 5% PEG/NaCl, resuspended in 15% glycerol in PBS, and frozen until use. Typical library sizes ranged from about 10⁹ to about 10¹¹ transformants. Fc-dimers were displayed on phage via pairing between pIII-fused Fc and soluble Fc not attached to pIII (the latter being generated due to the amber stop codon before pIII).

### Generation of Yeast-Display Libraries

[0674] A DNA template coding for the wild-type human Fc sequence was synthesized and incorporated into a yeast display vector. For CH2 and CH3 libraries, the Fc polypeptides were displayed on the Aga2p cell wall protein. Both vectors contained prepro leader peptides with a Kex2 cleavage sequence, and a c-Myc epitope tag fused to the terminus of the Fc.

[0675] Yeast display libraries were assembled using methods similar to those described for the phage libraries, except that amplification of fragments was performed with primers containing homologous ends for the vector. Freshly prepared electrocompetent yeast (i.e., strain EBY100) were electroporated with linearized vector and assembled library inserts. Electroporation methods will be known to one of skill in the art. After recovery in selective SD-CAA media, the yeast were grown to confluence and split twice, then induced for protein expression by transferring to SG-CAA media. Typical library sizes ranged from about 10⁷ to about 10⁹ transformants. Fc-dimers were formed by pairing of adjacently displayed Fc monomers.

### General Methods for Phage Selection

[0676] Phage methods were adapted from Phage Display: A Laboratory Manual (Barbas, 2001). Additional protocol details can be obtained from this reference.

[0677] Plate Sorting Methods

[0678] Antigen was coated on MaxiSorp® microtiter plates (typically 1-10 μg/mL) overnight at 4° C. The phage libraries were added into each well and incubated overnight for binding. Microtiter wells were washed extensively with PBS containing 0.05% Tween® 20 (PBST) and bound phage were eluted by incubating the wells with acid (typically 50 mM HCl with 500 mM KCl, or 100 mM glycine, pH 2.7) for 30 minutes. Eluted phage were neutralized with 1 M Tris (pH 8) and amplified using TG1 cells and M13/KO7 helper phage and grown overnight at 37° C. in 2YT media containing 50 μg/mL carbenacillin and 50 ug/mL Kanamycin. The titers of phage eluted from a target-containing well were compared to titers of phage recovered from a non-target-containing well to assess enrichment. Selection stringency was increased by subsequently decreasing the incubation time during binding and increasing washing time and number of washes.

[0679] Bead Sorting Methods

[0680] Antigen was biotinylated through free amines using NHS-PEG4-Biotin (obtained from Pierce™). For biotinylation reactions, a 3- to 5-fold molar excess of biotin reagent was used in PBS. Reactions were quenched with Tris followed by extensive dialysis in PBS. The biotinylated antigen was immobilized on streptavidin-coated magnetic beads, (i.e., M280-streptavidin beads obtained Thermo Fisher). The phage display libraries were incubated with the antigen-coated beads at room temperature for 1 hour. The unbound phage were then removed and beads were washed with PBST. The bound phage were eluted by incubating with 50 mM HCl containing 500 mM KCl (or 0.1 M glycine, pH 2.7) for 30 minutes, and then neutralized and propagated as described above for plate sorting.

[0681] After three to five rounds of panning, single clones were screened by either expressing Fc on phage or solubly in the E. coli periplasm. Such expression methods will be known to one of skill in the art. Individual phage supernatants or periplasmic extracts were exposed to blocked ELISA plates coated with antigen or a negative control and were subsequently detected using HRP-conjugated goat anti-Fc (obtained from Jackson Immunoresearch) for periplasmic extracts or anti-M13 (GE Healthcare) for phage, and then developed with TMB reagent (obtained from Thermo Fisher). Wells with OD₄₅₀ values greater than around 5-fold over background were considered positive clones and sequenced, after which some clones were expressed either as a soluble Fc fragment or fused to Fab fragments.

### General Methods for Yeast Selection

[0682] Bead Sorting (Magnetic-Assisted Cell Sorting (MACS)) Methods

[0683] MACS and FACS selections were performed similarly to as described in Ackerman et al., Biotechnol. Prog., 2009 25(3):774. Streptavidin magnetic beads (e.g., M-280 streptavidin beads from ThermoFisher) were labeled with biotinylated antigen and incubated with yeast (typically 5-10× library diversity). Unbound yeast were removed, the beads were washed, and bound yeast were grown in selective media and induced for subsequent rounds of selection.

[0684] Fluorescence-Activated Cell Sorting (FACS) Methods

[0685] Yeast were labeled with anti-c-Myc antibody to monitor expression and biotinylated antigen (concentration varied depending on the sorting round). In some experiments, the antigen was pre-mixed with streptavidin-Alexa Fluor® 647 in order to enhance the avidity of the interaction. In other experiments, the biotinylated antigen was detected after binding and washing with streptavidin-Alexa Fluor® 647. Singlet yeast with binding were sorted using a FACS Aria III cell sorter. The sorted yeast were grown in selective media then induced for subsequent selection rounds.

[0686] After an enriched yeast population was achieved, yeast were plated on SD-CAA agar plates and single colonies were grown and induced for expression, then labeled as described above to determine their propensity to bind to the target. Positive single clones were subsequently sequenced for binding antigen, after which some clones were expressed either as a soluble Fc fragment or as fused to Fab fragments.

### General Methods for Screening

[0687] Screening by ELISA

[0688] Clones were selected from panning outputs and grown in individual wells of 96-well deep-well plates. The clones were either induced for periplasmic expression using autoinduction media (obtained from EMD Millipore) or infected with helper phage for phage-display of the individual Fc variants on phage. ELISA plates were coated with antigen, typically at 0.5 mg/mL overnight, then blocked with 1% BSA before addition of phage or periplasmic extracts. After a 1-hour incubation and washing off unbound protein, HRP-conjugated secondary antibody was added (i.e., anti-Fc or anti-M13 for soluble Fc or phage-displayed Fc, respectively) and incubated for 30 minutes. The plates were washed again, and then developed with TMB reagent and quenched with 2N sulfuric acid. Absorbance at 450 nm was quantified using a plate reader (BioTek®) and binding curves were polotted using Prism software where applicable. In some assays, soluble transferrin or other competitor was added during the binding step, typically at significant molar excess.

[0689] Screening by Flow Cytometry

[0690] Fc variant polypeptides (expressed either on phage, in periplasmic extracts, or solubly as fusions to Fab fragments) were added to cells in 96-well V-bottom plates (about 100,000 cells per well in PBS+1% BSA (PBSA)), and incubated at 4° C. for 1 hour. The plates were subsequently spun and the media was removed, and then the cells were washed once with PBSA. The cells were resuspended in PBSA containing secondary antibody (typically goat anti-human-IgG-Alexa Fluor® 647 (obtained from Thermo Fisher)). After 30 minutes, the plates were spun and the media was removed, the cells were washed 1-2 times with PBSA, and then the plates were read on a flow cytometer (i.e., a FACSCanto™ II flow cytometer). Median fluorescence values were calculated for each condition using FlowJo software and binding curves were plotted with Prism software.

TABLE 11
CH3 Domain Modification

| Clone name | Group | 384 | 385 | 386 | 387 | 388 | 389 | 390 | 391 | . . . | 413 | 414 | 415 | 416 | 417 | 418 | 419 | 420 | 421 |
|---|---|---|---|---|---|---|---|---|---|---|---|---|---|---|---|---|---|---|---|
| Wild-type | n/a | N | G | Q | P | E | N | N | Y | . . . | D | K | S | R | W | Q | Q | G | N |
| 1 | | L | G | L | V | W | V | G | Y | . . . | A | K | S | T | W | Q | Q | G | W |
| 2 | | Y | G | T | V | W | S | H | Y | . . . | S | K | S | E | W | Q | Q | G | Y |
| 3 | | Y | G | T | E | W | S | Q | Y | . . . | E | K | S | D | W | Q | Q | G | H |
| 4 | | Y | G | T | P | W | A | L | Y | . . . | L | K | S | E | W | Q | Q | G | W |
| 17 | 2 | Y | G | T | V | W | S | K | Y | . . . | S | K | S | E | W | Q | Q | G | F |
| 18 | 1 | L | G | H | V | W | A | V | Y | . . . | P | K | S | T | W | Q | Q | G | W |
| 21 | 1 | L | G | L | V | W | V | G | Y | . . . | P | K | S | T | W | Q | Q | G | W |
| 25 | 1 | M | G | H | V | W | V | G | Y | . . . | D | K | S | T | W | Q | Q | G | W |
| 34 | 1 | L | G | L | V | W | V | F | S | . . . | P | K | S | T | W | Q | Q | G | W |
| 35 | 2 | Y | G | T | E | W | S | S | Y | . . . | T | K | S | E | W | Q | Q | G | F |
| 44 | 2 | Y | G | T | E | W | S | N | Y | . . . | S | K | S | E | W | Q | Q | G | F |
| 51 | 1/2 | L | G | H | V | W | V | G | Y | . . . | S | K | S | E | W | Q | Q | G | W |
| 3.1-3 | 1 | L | G | H | V | W | V | A | T | . . . | P | K | S | T | W | Q | Q | G | W |
| 3.1-9 | 1 | L | G | P | V | W | V | H | T | . . . | P | K | S | T | W | Q | Q | G | W |
| 3.2-5 | 1 | L | G | H | V | W | V | D | Q | . . . | P | K | S | T | W | Q | Q | G | W |
| 3.2-19 | 1 | L | G | H | V | W | V | N | Q | . . . | P | K | S | T | W | Q | Q | G | W |
| 3.2-1 | 1 | L | G | H | V | W | V | N | F | . . . | P | K | S | T | W | Q | Q | G | W |
| 3.4-1 | | W | G | F | V | W | S | T | Y | . . . | P | K | S | N | W | Q | Q | G | F |
| 3.4-19 | | W | G | H | V | W | S | T | Y | . . . | P | K | S | N | W | Q | Q | G | Y |
| 3.2-3 | | L | G | H | V | W | V | E | Q | . . . | P | K | S | T | W | Q | Q | G | W |
| 3.2-14 | | L | G | H | V | W | V | G | V | . . . | P | K | S | T | W | Q | Q | G | W |
| 3.2-24 | | L | G | H | V | W | V | H | T | . . . | P | K | S | T | W | Q | Q | G | W |
| 3.4-26 | | W | G | T | V | W | G | T | Y | . . . | P | K | S | N | W | Q | Q | G | Y |
| 3.2-17 | | L | G | H | V | W | V | G | T | . . . | P | K | S | T | W | Q | Q | G | W |

TABLE 12
Additional CH3 Domain Modifications

| Clone name | 378 | 379 | 380 | 381 | 382 | 383 | 384 | 385 | 386 | 387 | 388 | 389 | 390 | 391 | 392 | 411 | 412 | 413 | 414 | 415 | 416 | 417 | 418 | 419 | 420 | 421 | 422 | 423 |
|---|---|---|---|---|---|---|---|---|---|---|---|---|---|---|---|---|---|---|---|---|---|---|---|---|---|---|---|---|
| Wild-type | A | V | E | W | E | S | N | G | Q | N | E | N | N | Y | K | T | V | D | K | S | R | W | Q | Q | G | N | V | F |
| 35.20.1 | • | • | • | • | • | • | F | • | T | E | W | S | S | • | • | • | • | T | • | E | E | • | • | • | • | F | • | • |
| 35.20.2 | • | • | • | • | • | • | Y | • | T | E | W | A | S | • | • | • | • | T | • | E | E | • | • | • | • | F | • | • |
| 35.20.3 | • | • | • | • | • | • | Y | • | T | E | W | V | S | • | • | • | • | T | • | E | E | • | • | • | • | F | • | • |
| 35.20.4 | • | • | • | • | • | • | Y | • | T | E | W | S | S | • | • | • | • | S | • | E | E | • | • | • | • | F | • | • |
| 35.20.5 | • | • | • | • | • | • | F | • | T | E | W | A | S | • | • | • | • | T | • | E | E | • | • | • | • | F | • | • |
| 35.20.6 | • | • | • | • | • | • | F | • | T | E | W | V | S | • | • | • | • | T | • | E | E | • | • | • | • | F | • | • |
| 35.21.a.1 | • | • | W | • | • | • | F | • | T | E | W | S | S | • | • | • | • | T | • | E | E | • | • | • | • | F | • | • |
| 35.21.a.2 | • | • | W | • | • | • | Y | • | T | E | W | A | S | • | • | • | • | T | • | E | E | • | • | • | • | F | • | • |
| 35.21.a.3 | • | • | W | • | • | • | Y | • | T | E | W | V | S | • | • | • | • | T | • | E | E | • | • | • | • | F | • | • |
| 35.21.a.4 | • | • | W | • | • | • | Y | • | T | E | W | S | S | • | • | • | • | S | • | E | E | • | • | • | • | F | • | • |
| 35.21.a.5 | • | • | W | • | • | • | F | • | T | E | W | A | S | • | • | • | • | T | • | E | E | • | • | • | • | F | • | • |
| 35.21.a.6 | • | • | W | • | • | • | F | • | T | E | W | V | S | • | • | • | • | T | • | E | E | • | • | • | • | F | • | • |
| 35.23.1 | • | • | • | • | • | • | F | • | T | E | W | S | • | • | • | • | • | T | • | E | E | • | • | • | • | F | • | • |
| 35.23.2 | • | • | • | • | • | • | Y | • | T | E | W | A | • | • | • | • | • | T | • | E | E | • | • | • | • | F | • | • |
| 35.23.3 | • | • | • | • | • | • | Y | • | T | E | W | V | • | • | • | • | • | T | • | E | E | • | • | • | • | F | • | • |
| 35.23.4 | • | • | • | • | • | • | Y | • | T | E | W | S | • | • | • | • | • | S | • | E | E | • | • | • | • | F | • | • |
| 35.23.5 | • | • | • | • | • | • | F | • | T | E | W | A | • | • | • | • | • | T | • | E | E | • | • | • | • | F | • | • |
| 35.23.6 | • | • | • | • | • | • | F | • | T | E | W | V | • | • | • | • | • | T | • | E | E | • | • | • | • | F | • | • |
| 35.24.1 | • | • | W | • | • | • | F | • | T | E | W | S | • | • | • | • | • | T | • | E | E | • | • | • | • | F | • | • |
| 35.24.2 | • | • | W | • | • | • | Y | • | T | E | W | A | • | • | • | • | • | T | • | E | E | • | • | • | • | F | • | • |
| 35.24.3 | • | • | W | • | • | • | Y | • | T | E | W | V | • | • | • | • | • | T | • | E | E | • | • | • | • | F | • | • |
| 35.24.4 | • | • | W | • | • | • | Y | • | T | E | W | S | • | • | • | • | • | S | • | E | E | • | • | • | • | F | • | • |
| 35.24.5 | • | • | W | • | • | • | F | • | T | E | W | A | • | • | • | • | • | T | • | E | E | • | • | • | • | F | • | • |
| 35.24.6 | • | • | W | • | • | • | F | • | T | E | W | V | • | • | • | • | • | T | • | E | E | • | • | • | • | F | • | • |
| 35.21.17.1 | • | • | L | • | • | • | F | • | T | E | W | S | S | • | • | • | • | T | • | E | E | • | • | • | • | F | • | • |
| 35.21.17.2 | • | • | L | • | • | • | Y | • | T | E | W | A | S | • | • | • | • | T | • | E | E | • | • | • | • | F | • | • |
| 35.21.17.3 | • | • | L | • | • | • | Y | • | T | E | W | V | S | • | • | • | • | T | • | E | E | • | • | • | • | F | • | • |
| 35.21.17.4 | • | • | L | • | • | • | Y | • | T | E | W | S | S | • | • | • | • | S | • | E | E | • | • | • | • | F | • | • |
| 35.21.17.5 | • | • | L | • | • | • | F | • | T | E | W | A | S | • | • | • | • | T | • | E | E | • | • | • | • | F | • | • |
| 35.21.17.6 | • | • | L | • | • | • | F | • | T | E | W | V | S | • | • | • | • | T | • | E | E | • | • | • | • | F | • | • |
| 35.20 | • | • | • | • | • | • | Y | • | T | E | W | S | S | • | • | • | • | T | • | E | E | • | • | • | • | F | • | • |
| 35.21 | • | • | W | • | • | • | Y | • | T | E | W | S | S | • | • | • | • | T | • | E | E | • | • | • | • | F | • | • |
| 35.22 | • | • | W | • | • | • | Y | • | T | E | W | S | • | • | • | • | • | T | • | E | E | • | • | • | • | F | • | • |
| 35.23 | • | • | • | • | • | • | Y | • | T | E | W | S | • | • | • | • | • | T | • | E | E | • | • | • | • | F | • | • |
| 35.24 | • | • | W | • | • | • | Y | • | T | E | W | S | • | • | • | • | • | T | • | E | E | • | • | • | • | F | • | • |
| 35.21.17 | • | • | L | • | • | • | Y | • | T | E | W | S | S | • | • | • | • | T | • | E | E | • | • | • | • | F | • | • |
| 35.N390 | • | • | • | • | • | • | Y | • | T | E | W | S | • | • | • | • | • | T | • | E | E | • | • | • | • | F | • | • |
| 35.20.1.1 | • | • | • | • | • | • | F | • | T | E | W | S | S | • | • | • | • | S | • | E | E | • | • | • | • | F | • | • |
| 35.23.2.1 | • | • | • | • | • | • | Y | • | T | E | W | A | • | • | • | • | • | S | • | E | E | • | • | • | • | F | • | • |
| 35.23.1.1 | • | • | • | • | • | • | F | • | T | E | W | S | • | • | • | • | • | S | • | E | E | • | • | • | • | F | • | • |
| 35.S413 | • | • | • | • | • | • | Y | • | T | E | W | S | S | • | • | • | • | S | • | E | E | • | • | • | • | F | • | • |
| 35.23.3.1 | • | • | • | • | • | • | Y | • | T | E | W | V | • | • | • | • | • | S | • | E | E | • | • | • | • | F | • | • |
| 35.N390.1 | • | • | • | • | • | • | Y | • | T | E | W | S | • | • | • | • | • | S | • | E | E | • | • | • | • | F | • | • |
| 35.23.6.1 | • | • | • | • | • | • | F | • | T | E | W | V | • | • | • | • | • | S | • | E | E | • | • | • | • | F | • | • |

### Example 6. Generation and Characterization of Anti-TREM2 Antibody Comprising Modified Fc Polypeptide

### Generation of TREM2 Fabs Fused to BBB-Penetrating Fc Polypeptide

### RS9.F6/3C. 35.21.17

[0691] A first RS9.F6 heavy chain was constructed by cloning the Fd (VH+CH1 regions) of clone RS9.F6 into an expression vector comprising an Fc engineered to bind to transferrin receptor and also comprising L234A, L235A, and P331G substitutions (according to the EU numbering scheme) to alter effector function and a “knob” mutation (T366W) to prevent homodimerization and promote heterodimerization with an Fc comprising “hole” mutations (T366W/L368A/Y407V). The first RS9.F6 heavy chain was designed to express the sequence of SEQ ID NO:91.

[0692] A second RS9.F6 heavy chain was constructed by cloning the Fd (VH+CH1 regions) of clone RS9.F6 into an expression vector comprising an Fc comprising the “hole” mutations (T366W/L368A/Y407V) and also comprising L234A, L235A, and P331G substitutions (according to the EU numbering scheme) to alter effector function, but lacking the transferrin receptor binding mutations. The second RS9.F6 heavy chain was designed to express the sequence of SEQ ID NO:92.

[0693] The light chain for RS9.F6 was constructed using an expression vector comprising a polynucleotide encoding the sequence of SEQ ID NO:35.

[0694] The vectors comprising polynucleotides encoding the aforementioned sequences of SEQ ID NOs:35, 91, and 92 (for RS9.F6) were co-transfected to ExpiCHO or Expi293 cells in the ratio of 1:1:2 (first heavy chain:second heavy chain:light chain). The expressed protein (referred to as “RS9.F6/3C.35.21.17”) was purified by Protein A chromatography followed by preparative size-exclusion chromatography (SEC) by methods familiar to those with skill in the art.

### 3D3.A1/3C.35.21.17

[0695] A first 3D3 heavy chain is constructed by cloning the Fd (VH+CH1 regions) of clone 3D3.A1 into an expression vector comprising an Fc engineered to bind to transferrin receptor and also comprising L234A, L235A, and P331G substitutions (according to the EU numbering scheme) to alter effector function and a “knob” mutation (T366W) to prevent homodimerization and promote heterodimerization with an Fc comprising “hole” mutations (T366W/L368A/Y407V). The first 3D3.A1 heavy chain is designed to express the sequence of SEQ ID NO:94. A second 3D3.A1 heavy chain is constructed by cloning the Fd (V_{H}+CH1 regions) of clone 3D3.A1 into an expression vector comprising an Fc comprising the “hole” mutations (T366W/L368A/Y407V) and also comprising L234A, L235A, and P331G substitutions (according to the EU numbering scheme) to alter effector function, but lacking the transferrin receptor binding mutations. The second 3D3.A1 heavy chain is designed to express the sequence of SEQ ID NO:95.

[0696] The light chain for 3D3.A1 is constructed using an expression vector comprising a polynucleotide encoding the sequence of SEQ ID NO:29.

[0697] The vectors comprising polynucleotides encoding the aforementioned sequences of SEQ ID NOs:29, 94, and 95 (for 3D3.A1) are co-transfected to ExpiCHO or Expi293 cells in the ratio of 1:1:2 (first heavy chain:second heavy chain:light chain). The expressed proteins (referred to as “3D3/3C.35.21.17”) are purified by Protein A chromatography followed by preparative size-exclusion chromatography (SEC) by methods familiar to those with skill in the art.

### Binding of RS9.F6/3C35.21.17 to TREM2 and Transferrin Receptor (TfR)

[0698] The binding of the TREM2/TfR-binding protein RS9.F6/3C35.21.17 to TREM2 and TfR was measured using SPR on a Biacore T200 instrument. To measure TfR binding, anti-human-Fab was immobilized on a CM5 chip, and the TREM2/TfR-binding protein was captured. Full-length human TfR or human TfR apical domain at serial dilution (e.g., concentrations of 1-1000 nM) was flowed over the chip (180 second association time) and then allowed to dissociate. Fitting was performed using a 1:1 binding model. To measure TREM2 binding, anti-human-Fc antibody was immobilized on a CM5 chip, and the TREM2/TfR-binding protein was captured. A range of concentrations of recombinant TREM2-His protein were flowed over the chip, and allowed to associate and dissociate. The resulting sensograms were fitted using a 1:1 Langmuir model to estimate kₒₙ and k_{off} (FIG. 10).

### Biacore Assessment of RS9.F6/3C35.21.17

[0699] The affinities of RS9.F6/3C35.21.17 for human TREM2 and TfR were determined by surface plasmon resonance using a Biacore™ T200. Biacore Series S CM5 sensor chips were immobilized with a mixture of two monoclonal mouse anti-Fab antibodies (Human Fab capture kit from GE Healthcare). Serial 3-fold dilutions of each antigen were injected at a flow rate of 30 μL/min. The binding of the antigens to captured antibody was monitored for 30 to 180 seconds and then their dissociation was monitored for 30-300 seconds in HBS-EP+running buffer (GE, # BR100669). Binding response was corrected by subtracting the RU from a blank flow cell. A 1:1 Languir model of simultaneous fitting of kₒₙ and k_{off} was used for kinetics analysis. The binding kinetics of the RS9.F6/3C35.21.17 are shown in Table 13 below. Biacore binding showed the bispecific TREM2/TfR-binding protein was capable of binding with high affinity to TREM2 and expected affinity to hTfR.

TABLE 13
Summary of binding kinetics of RS9.F6/3C35.21.17 and controls

| | | | | KD |
|---|---|---|---|---|
| Ligand | Analyte | ka (1/Ms) | kd (1/s) | (nM) |
| RS9.F6/ | hTREM2 | 1.5E+05 | 3.8E−04 | 2.6 |
| 3C35.21.17_LALAPG | | | | |
| RS9.F6/ | hTfR | 1.7E+06 | 1.9E−01 | 110 |
| 3C35.21.17_LALAPG | apical | | | |
| | domain | | | |
| RS9.F6 | hTREM2 | 1.5E+05 | 3.4E−04 | 2.3 |
| RS9.F6 | hTfR | N.D. | N.D. | N.D. |
| | apical | | | |
| | domain | | | |
| 3D3 | hTREM2 | 4.8E+05 | 1.9E−02 | 40 |
| 3D3 | hTfR | N.D. | N.D. | N.D. |
| | apical | | | |
| | domain | | | |

N.D. = not determined

### Example 7. Epitope Mapping and X-Ray Crystallography of TREM2 Peptide-F6 Fab Co-Complex

[0700] As described below, the epitope of antibody RS9.F6 was determined using hydrogen-deuterium exchange mass spectroscopy. In addition, the crystal structure of RS9.F6 bound to a TREM2 peptide was also elucidated.

### F6 Fab Epitope Mapping by Hydrogen-Deuterium Exchange-Mass Spectroscopy (HDX-MS)

[0701] For epitope mapping of the binding of a Fab fragment of anti-TREM2 antibody RS9.F6 (“F6”) to human TREM2, a TREM2 extracellular domain (ECD) amino acid sequence without signal peptide and His tag was used:

(SEQ ID NO: 333)
SGAHNTTVFQGVAGQSLQVSCPYDSMKHWGRRKAWCRQLGEKGPCQRVVS
THNLWLLSFLRRWNGSTAITDDTLGGTLTITLRNLQPHDAGLYQCQSLHG
SEADTLRKVLVEVLADPLDHRDAGDLWFPGESESFEDAHVEHSISRSLLE
GEIPFPPTS

[0702] Pepsin/Protease XIII Digestion and LC-MS of TREM2 ECD to Determine Sequence Coverage

[0703] 5.77 μg of native or 7.4 μg TREM2 in 130 μL of control buffer (30 mM Tris, 200 mM sodium chloride, 3% Glycerol at pH 8.0) was denatured by adding 130 μL of 4 M guanidine hydrochloride, 0.85 M TCEP buffer (final pH was 2.5) and incubating the mixture for 3 min at 20° C. Then, the mixture was subjected to online pepsin/protease XIII digestion using an in-house packed pepsin/protease XIII column (2.1×30 mm). The resultant peptides were analyzed using an UPLC-MS system comprised of a Waters Acquity UPLC coupled to a Q Exactive™ Hybrid Quadrupole-Orbitrap Mass Spectrometer (Thermo). The peptides were separated on a 50×1 mm C8 column with a 16.5 min gradient from 2-31% solvent B (0.2% formic acid in acetonitrile). Solvent A was 0.2% formic acid in water. The injection valve and pepsin/protease XIII column and their related connecting tubings were inside a cooling box maintained at 10° C. for native TREM2, respectively. The second switching valve, C8 column and their related connecting stainless steel tubings were inside another chilled circulating box maintained at −6° C. Peptide identification was done through searching MS/MS data against the TREM2 sequence with Mascot. The mass tolerance for the precursor and product ions were 7 ppm and 0.02 Da, respectively.

[0704] HDXMS for Native TREM2 with and without the Presence of Fab

[0705] 12 μL of TREM2 (5.77 μg) or 12 μL of TREM2 & TREM2 Fab mixture (5.77 μg: 28.85 μg) was incubated with 118 μL deuterium oxide labeling buffer (30 mM Tris, 200 mM sodium chloride, 3% Glycerol at pD 7.6) for 0 s, 10 s, 60 s, 600 s or 3600 s at 20° C. Hydrogen/deuterium exchange was quenched by adding 130 μL of 4 M guanidine hydrochloride, 0.85 M TCEP buffer (final pH was 2.5). Subsequently, the quenched samples were subjected to on column pepsin/protease XIII digestion and LC-MS analysis as described above. The mass spectra were recorded in MS only mode.

[0706] Raw MS data was processed using HDX WorkBench, software for the analysis of H/D exchange MS data (J. Am. Soc. Mass Spectrom. 2012, 23 (9), 1512-1521). The deuterium levels were calculated using the average mass difference between the deuterated peptide and its native form (t₀).

[0707] Results

[0708] 78.8% sequence coverage was achieved for native TREM2. TREM2 was incubated in deuterium oxide, either alone or in complex with Fab. The deuterium exchange was carried at 20° C. for 0 s, 10 s, 60 s, 600 s, or 3600 s. The exchange reaction was quenched by low pH and the proteins were digested with pepsin/protease XIII. The deuterium levels at the identified peptides were monitored from the mass shift on LC-MS. The deuterium buildup curves over exchange time for all the peptides were plotted. A differential heat map comparing hydrogen/deuterium exchange of TREM2 alone to that of TREM2 & Fab mixture is shown in FIGS. 11A-11D. As shown in FIGS. 11A and 11D, TREM2 showed a reduction in deuterium uptake at sequence AA157-166 (DLWFPGESES (SEQ ID NO:334), corresponding to residues 140-149 of the human TREM2 of SEQ ID NO:96) upon binding to Fab, thereby suggesting that the epitope targeted by the Fab for binding to native TREM2 is within this peptide region.

### TREM2-F6 Fab Co-Crystallization Method

[0709] Human TREM2 Synthetic Peptide 9-Mer Amino Acid Sequence

[0710] The synthetic 9-mer peptide DLWFPGESE (SEQ ID NO:335), corresponding to amino acid residues 140-148 of human TREM2 (according to UniProtKB entry TREM2_HUMAN) was used for co-crystallization.

[0711] F6 Fab Expression

[0712] The Fab fragment of the F6 anti-TREM2 antibody was expressed in Expi-293 cells at an initial cell density of 2.5×10⁶ cells/ml. Cells were harvested 96 hours post-transfection.

[0713] F6 Purification

[0714] The Fab was purified with Protein L resin. Immobilized Fab was washed with 20 mM Tris pH 8.5 and eluted with 0.1 M glycine pH 2.5. Protein eluate was immediately neutralized with 1M Tris pH 8.0. Protein eluate from Protein L resin was further purified by Superdex 200 size exclusion chromatography with 30 mM Tris pH 8.0, 200 mM NaCl, 3% glycerol in mobile phase.

[0715] Crystallization

[0716] Purified Fab solution was concentrated to 25 mg/mL in 20 mM M Tris pH 8.0, 0.2 M NaCl, 3% glycerol. The TREM2 9-mer peptide was reconstituted into 20 mM Tris pH 8.5 at 50 mg/ml. The Fab:peptide complex was obtained by mixing the components at 1:10 molar ratio with the excess of peptide at 23 mg/ml final concentration.

[0717] Crystallization experiments were performed at room temperature in a sitting drop format in Intelli 96-3 low-profile plates following the nano crystallization protocol. The setups included 20 commercially available and in-house screens with 96 conditions each. Crystals suitable for X-ray analysis grew from 25% PEG 8000 in 0.1 M HEPES buffer, pH 7.5. The crystals were cryoprotected by soaking in the mother liquor supplemented with 20% glycerol and flash frozen in liquid nitrogen.

[0718] X-Ray Data Collection

[0719] X-ray diffraction data were collected at the IMCA-CAT beamline 17-ID at the Advanced Photon Source (APS) at the Argonne National Laboratory (ANL) using a Dectris Pilatus 6M detector. The wavelength was 1.000 Å, exposure time was 0.25 s per 0.25° image. The diffraction images were processed with XDS to a resolution of 2.4 Å in space group P21 with unit cell dimensions: a=48.66 Å, b=65.37 Å, c=69.36 Å, and P=107.29°. The asymmetric unit contains one Fab:peptide complex.

[0720] The structure of the Fab:peptide complex was solved by molecular replacement with Phaser using a search model derived from PDB entry 5i16. The structure was manually rebuilt with Coot and refined using Refmac5. The Fab model contains all residues except Gln1 and Ser131-Ser135 of the heavy chain and a few residues at the C-terminus of each chain, all of which are disordered. Residues 140-146 of the TREM2 peptide are clearly visible in the electron density, while residues 147-148 are disordered. X-ray data and refinement statistics are given in Table 14 below.

TABLE 14
X-Ray Data and Refinement Statistics
X-Ray data statistics

| | |
|---|---|
| Space group | P21 |

Unit cell parameters

| | |
|---|---|
| a, b, c (Å) | 48.66, 65.37, 69.36 |
| α, β, γ (°) | 90, 107.29, 90 |

Refinement statistics

| | |
|---|---|
| Resolution range (Å) | 20.0-2.40 |
| Final R_{work} | 0.187 |
| Final R_{free} | 0.264 |
| Mean B value (Å²) | 56.5 |
| R.m.s. deviations | |
| Bonds (Å) | 0.006 |
| Angles (°) | 1.13 |
| Chiral volumes (Å³) | 0.070 |
| Ramachandran plot | |
| Preferred regions (%) | 97.4 |
| Allowed regions (%) | 2.6 |
| Outliers (%) | 0.0 |

[0721] Structure Analysis

[0722] FIG. 12A shows that the F6 Fab binds the TREM2 peptide in the central cavity between the variable domains. The peptide is in the folded loop-like conformation, with the N-terminal Trp142 side chain buried deep in the binding cleft making contacts with CDR framework residues. As shown in FIG. 12B, the residues DLWFP (SEQ ID NO:336; residues 140-144 of the hTREM2 protein) make direct contacts with the Fab. The last two residues of the peptide, SE (residues 147-148 of the hTREM2 protein), are unstructured and do not have electron density in the structure. This type of immersed mode of antigen binding is not known for many protein-protein interactions.

[0723] All six CDRs are involved in antigen binding. In total, 24 Fab residues are in direct contact (<4.0 Å) with the peptide, 7 of which are in the framework regions (FIGS. 13A-13B). These results show that an intricate network of contacts support F6 high-affinity binding, and that the contacts with Trp142 may be the primary driver to maintain high affinity.

TABLE 15
Informal Sequence Listing

| SEQ ID NO | Sequence | Description |
|---|---|---|
| 1 | GGACAGGGATCCAGAGTTCC | muIgG1 3′ primer |
| 2 | AGCTGGGAAGGTGTGCACAC | muIgG2 3′ primer |
| 3 | CAGGGGCCAGTGGATAGAC | muIgG3 3′ primer |
| 4 | GACATTGATGTCTTTGGGGT | muCkappa.1 3′ primer |
| 5 | TTCACTGCCATCAATCTTCC | muCkappa.2 3′ primer |
| 6 | QVQLQQPGAELVKPGASVKLSCKASGYTFTSYWMHWVKQSPGRGLEWIGRSDP | RS9.F6 VH amino acid |
| | TTGGTNYNEKFKTKATLTVDKPSSTAYMQLSSLTSDDSAVYYCVRTSGTGDYW | sequence |
| | GQGTSLTVSSAKTTAPSVYPLAPVCGGTTGSSVT | |
| 7 | DVVMTQTPLSLPVSLGDQASISCRSSQSLVHNNGNTFLHWYLQKPGQSPKLLI | RS9.F6 VL amino acid |
| | YKVSNRFSGVPDRFSGSGSGTDFTLKISRVEAEDLGVYFCSQTTHVPPTFGGG | sequence |
| | TKLEIKRADAAPTVSIFPPSSEQLTSGGASVVCF | |
| 8 | GYTFTSY | RS9.F6 CDR-H1 amino acid |
| | | sequence |
| 9 | IGRSDPTTGGTNYNE | RS9.F6 CDR-H2 amino acid |
| | | sequence |
| 10 | VRTSGTGDY | RS9.F6 and RS.F10 CDR-H3 |
| | | amino acid sequence; |
| 11 | RSSQSLVHNNGNTFLH | RS9.F6 and RS.F10 CDR-L1 |
| | | amino acid sequence |
| 12 | VSNRFS | RS9.F6 CDR-L2 amino acid |
| | | sequence |
| 13 | SQTTHVPPT | RS9.F6 and RS.F10 CDR-L3 |
| | | amino acid sequence |
| 14 | QVQLQQSGAELARPGASVKLSCKASGYTFTSYWIQWVKQRPGQGLEWIGTIYP | 21D11 VH amino acid |
| | GDGDARYTQKFKGKATLTADKSSSTTYMQLNSLASEDSAVYYCARNGITTAGY | sequence |
| | YAMDYWGQGTSVTVSS | |
| 15 | QVQLQQSGADLLRPGVSVKISCKGSGYTFTDHAMHWVKQSHAELEWIGVISTY | 21D4.D1 VH amino acid |
| | SGDTGYNQKFKGKATMTVDKSSSTAYLELARLTSEDSAIYYCAREGHYDDAMD | sequence |
| | YWGQGTSVTVSS | |
| 16 | EVQLQQSGPELVKPGASVKMSCKASGYTFTSYVMHWVKQKPGQGLEWIGYINP | 26D2 VH amino acid |
| | YTDGTKYNEKFKGKATLTSDKSSSTAYMDLSSLTSEDSAVYYCARGEVRRYAL | sequence |
| | DYWGQGTSVTVSS | |
| 17 | QVHLQQSGSELRSPGSSVKLSCKDFDSEVFPISYMSWIRQKPGHGFEWIGDIL | 26E2.A3 VH amino acid |
| | PSIGGRIYGVKFEDRATLDADTVSNTAYLELNSLTSEDSAIYYCARKDYGSLA | sequence; 24B4.A1 VH |
| | YWGQGTLVTVSA | amino acid sequence |
| 18 | EVQLQQSGPELVKPGASVKISCKTSGYTLSEYTMHWVIQSHGKSLEWIGGVIP | 3D3 A1 VH amino acid |
| | NSGGTSYNQKFRDKASLTVDKSSSTAYLELRSLTSEDSAVYYCARGDDSYRRG | sequence |
| | YALDYWGQGTSVTVSS | |
| 19 | EVQLQQSGAEVVKPGASVKLSCTASGFNIKDTYMHWVKQRPEQGLEWIGRIDP | 40H3.A4 VH amino acid |
| | ANGNTKYDPKFQGKATITADTSSNTAYLQLSSLTSEDTAVYYCATLFAYWGQG | sequence |
| | TLVTVSA | |
| 20 | DVQLQESGPGLVKPSQSLSLTCTVTGYSITSDYAWNWIRQFPGNKLEWMGYIN | 42E8.H1 VH amino acid |
| | YSGRTIYNPSLKSRISITRDTSKNHFFLQLISVTTEDTATYYCARWNGNYGFA | sequence |
| | YWGQGTLVTVSA | |
| 21 | DVQLQESGPGLVKPSQSLSLTCTVTGYSITSDYAWNWIRQFPGNRLEWMGYIS | 49H11.B1 VH amino acid |
| | FSGSTSYNPSLKSRISITRDTSKNQFFLQLNSVTTEDTATYYCARWNGNYGFA | sequence |
| | YWGQGTLVTVSA | |
| 22 | QVHLQQSGSELRSPGSSVKLSCKDFDSEVFPIAYMSWVRQKPGHGFEWIGDIL | 54C2.A1 VH amino acid |
| | PSIGRRIYGVKFEDKATLDADTVSNTAYLELNSLTSEDSAIYYCTRKDYGSLA | sequence |
| | YWGQGTLVTVSA | |
| 23 | QVQLKESGPGLVAPSQSLSITCTVSGFSLSRYSVYWVRQPPGKGLEWLGMIWG | 57D7.A1 VH amino acid |
| | GGNTDYNSALKSRLSISKDNSKSQVFLKMNSLQTDDSAMYYCVQYGGMDYWGQ | sequence |
| | GTSVTVSS | |
| 24 | QVQLQQPGAELVKPGASVKLSCKASGYTFTSYWMHWVKQSPGRGLEWIGRSDP | RS9.F6 VH amino acid |
| | TTGGTNYNEKFKTKATLTVDKPSSTAYMQLSSLTSDDSAVYYCVRTSGTGDYW | sequence; RS.F10 VH amino |
| | GQGTSLTVSS | acid sequence |
| 25 | DIQMTQSPASLSVSVGETVTITCRASENIYSNLAWYQQKQGRSPQLLVYAATN | 21D11 VL amino acid |
| | LADGVPSRFSGSGSGTQYSLKINSLQSEDFGYYYCQHFWGTPYTFGGGTKVEI | sequence |
| | K | |
| 26 | DVVMTQTPLTLSVTIGQPASFSCKSSQSLLDSDGKTYLNWLLRRPGQSPKRLI | 21D4.D1 VL amino acid |
| | YVVSKLDSGVPDRFTGSGSGTDFTLKISRVEAEDLGVYYCWQGTHFPYTFGGG | sequence |
| | TKLEIK | |
| 27 | DIQMTQSSSSFSVSLGDRVTITCKASEDIYNRLAWYQQKPGNAPRLLISGATS | 26D2 VL amino acid |
| | LETGVPSRFSGSGSGKDYTLSITSLQTEDVATYYCQQYWSTPWTFGGGTKLEI | sequence |
| | K | |
| 28 | DVVMTQTPLSLPVSLGDQASISCRSSQSLVHINGNTYLQWFLQKPGQSPKLLI | 26E2.A3 VL amino acid |
| | YKVSNRFSGVPDRFSGSGSGTAFTLKISRVEAEDLGVYFCSQSTHVPYTFGGG | sequence; 24B4.A1 VL |
| | TKLEIK | amino acid sequence |
| 29 | DIVMSQSPSSLAVSVGEKVTMSCKSSQSLLYSSNQKSYLAWYQQKPGQSPKLL | 3D3.A1 VL amino acid |
| | IYWASTRESGVPDRFRGSGSGTDFTLTISSVKAEDLAVYYCQQYFSYPPTFGG | sequence |
| | GTKLEIK | |
| 30 | DIVMTQAAFSNPVTLGTSASISCRSSKSLLHSNGITYLYWYLQKPGQSPQLLI | 40H3.A4 VL amino acid |
| | YQMSNLASGVPDRFSSSGSGIDFTLRINRVEAEDVGVYYCAQNLELPTFGSGT | sequence |
| | KLEIK | |
| 31 | DVVMTQNPLSLPVSLGDQASISCRSSQSLVHINGNTYLHWYLQKPGQSPKLLI | 42E8.H1 VL amino acid |
| | YKVSNRFSGVPDRFSGSGSGTDFTLKISRVEAEDLGVYFCSQTTHALFTFGSG | sequence |
| | TKLEIK | |
| 32 | DVVMTQTPLSLPVSLGDQASISCRSSQSLVHINGNTYLHWYLQKPGQSPKLLI | 49H11.B1 VL amino acid |
| | YKVSNRFSGVPDRFSGSGSGTDFTLKISRVEAEDLGVYFCSQSTHVTFTFGSG | sequence |
| | TKLEIK | |
| 33 | DVVMTQTPLSLPVSLGDQASISCRSSQSLVHINGNTYLQWYLQKPGQSPKLLI | 54C2.A1 VL amino acid |
| | YKVSNRFSGVPDRFSGSGSGTDFTLRISRVEAEDLGVYFCSQSTHLPYTFGGG | sequence |
| | TKLEIK | |
| 34 | DVLMTQTPLSLPVSLGDQASISCRSSQSIVHSNGNTYLEWYLQKPGQSPKLLI | 57D7.A1 VL amino acid |
| | YKVSNRFSGVPDRFSGSGSGTDFTLKISRVEAEDLGVYYCFQGSHVPYTFGGG | sequence |
| | TKLEIK | |
| 35 | DVVMTQTPLSLPVSLGDQASISCRSSQSLVHNNGNTFLHWYLQKPGQSPKLLI | RS9.F6 VL amino acid |
| | YKVSNRFSGVPDRFSGSGSGTDFTLKISRVEAEDLGVYFCSQTTHVPPTFGGG | sequence; RS.F10 VL amino |
| | TKLEIK | acid sequence |
| 36 | GYTFTSYWMH | RS9.F6 and RS.F10 CDR-H1 |
| 37 | RSDPTTGGTNYNEKFKT | RS9.F6 and RS.F10 CDR-H2 |
| 38 | KVSNRFS | RS9.F6, RS.F10, 26E2.A3, |
| | | 24B4.A1, 42E8.H1, |
| | | 49H11.B1, 54C2.A1, and |
| | | 57D7.A1 CDR-L2 |
| 39 | GYTFTSYWIQ | 21D11 CDR-H1 |
| 40 | TIYPGDGDARYTQKFKG | 21D11 CDR-H2 |
| 41 | ARNGITTAGYYAMDY | 21D11 CDR-H3 |
| 42 | RASENIYSNLA | 21D11 CDR-L1 |
| 43 | AATNLAD | 21D11 CDR-L2 |
| 44 | QHFWGTPYT | 21D11 CDR-L3 |
| 45 | GYTFTDHAMH | 21D4.D1 CDR-H1 |
| 46 | VISTYSGDTGYNQKFKG | 21D4.D1 CDR-H2 |
| 47 | AREGHYDDAMDY | 21D4.D1 CDR-H3 |
| 48 | KSSQSLLDSDGKTYLN | 21D4.D1 and 51D4 CDR-L1 |
| 49 | VVSKLDS | 21D4.D1 CDR-L2 |
| 50 | WQGTHFPYT | 21D4.D1 and 51D4 CDR-L3 |
| 51 | GYTFTSYVMH | 26D2 CDR-H1 |
| 52 | YINPYTDGTKYNEKFKG | 26D2 CDR-H2 |
| 53 | ARGEVRRYALDY | 26D2 CDR-H3 |
| 54 | KASEDIYNRLA | 26D2 CDR-L1 |
| 55 | GATSLET | 26D2 CDR-L2 |
| 56 | QQYWSTPWT | 26D2 CDR-L3 |
| 57 | DSEVFPISYMS | 26E2.A3 and 24B4.A1 CDR-H1 |
| 58 | DILPSIGGRIYGVKF | 26E2.A3 and 24B4.A1 CDR-H2 |
| 59 | ARKDYGSLAY | 26E2.A3 and 24B4.A1 CDR-H3 |
| 60 | RSSQSLVHINGNTYLQ | 26E2.A3, 24B4.A1, and |
| | | 54C2.A1 CDR-L1 |
| 61 | SQSTHVPYT | 26E2.A3 and 24B4.A1 CDR-L3 |
| 62 | GYTLSEYTMH | 3D3.A1 CDR-H1 |
| 63 | GVIPNSGGTSYNQKFRD | 3D3.A1 CDR-H2 |
| 64 | ARGDDSYRRGYALDY | 3D3.A1 CDR-H3 |
| 65 | KSSQSLLYSSNQKSYLA | 3D3.A1 CDR-L1 |
| 66 | WASTRES | 3D3.A1 CDR-L2 |
| 67 | QQYFSYPPT | 3D3.A1 CDR-L3 |
| 68 | GFNIKDTYMH | 40H3.A4 CDR-H1 |
| 69 | RIDPANGNTKYDPKFQG | 40H3.A4 CDR-H2 |
| 70 | ATLFAY | 40H3.A4 CDR-H3 |
| 71 | RSSKSLLHSNGITYLY | 40H3.A4 CDR-L1 |
| 72 | QMSNLAS | 40H3.A4 CDR-L2 |
| 73 | AQNLELPT | 40H3.A4 CDR-L3 |
| 74 | GYSITSDYAWN | 42E8.H1 and 49H11.B1 |
| | | CDR-H1 |
| 75 | YINYSGRTIYNPSLKS | 42E8.H1 CDR-H2 |
| 76 | ARWNGNYGFAY | 42E8.H1 and 49H11.B1 |
| | | CDR-H3 |
| 77 | RSSQSLVHINGNTYLH | 42E8.H1 and 49H11.B1 |
| | | CDR-L1 |
| 78 | SQTTHALFT | 42E8.H1 CDR-L3 |
| 79 | YISFSGSTSYNPSLKS | 49H11.B1 CDR-H2 |
| 80 | SQSTHVTFT | 49H11.B1 CDR-L3 |
| 81 | DSEVFPIAYMS | 54C2.A1 CDR-H1 |
| 82 | DILPSIGRRIYGVKFED | 54C2.A1 CDR-H2 |
| 83 | KDYGSLAY | 54C2.A1 CDR-H3 |
| 84 | SQSTHLPYT | 54C2.A1 CDR-L3 |
| 85 | GFSLSRYSVY | 57D7.A1 CDR-H1 |
| 86 | MIWGGGNTDYNSALKS | 57D7.A1 CDR-H2 |
| 87 | YGGMDY | 57D7.A1 CDR-H3 |
| 88 | RSSQSIVHSNGNTYLE | 57D7.A1 CDR-L1 |
| 89 | FQGSHVPYT | 57D7.A1 CDR-L3 |
| 90 | QVQLQQPGAELVKPGASVKLSCKASGYTFTSYWMHWVKQSPGRGLEWIGRSDP | RS9.F6-Fd |
| | TTGGTNYNEKFKTKATLTVDKPSSTAYMQLSSLTSDDSAVYYCVRTSGTGDYW | |
| | GQGTSLTVSSASTKGPSVFPLAPSSKSTSGGTAALGCLVKDYFPEPVTVSWNS | |
| | GALTSGVHTFPAVLQSSGLYSLSSVVTVPSSSLGTQTYICNVNHKPSNTKVDK | |
| | KVEPKSCDKTH | |
| 91 | QVQLQQPGAELVKPGASVKLSCKASGYTFTSYWMHWVKQSPGRGLEWIGRSDP | RS9.F6-Fd fused to Fc with |
| | TTGGTNYNEKFKTKATLTVDKPSSTAYMQLSSLTSDDSAVYYCVRTSGTGDYW | LALAPG, TfR binding, and |
| | GQGTSLTVSSASTKGPSVFPLAPSSKSTSGGTAALGCLVKDYFPEPVTVSWNS | knob mutations |
| | GALTSGVHTFPAVLQSSGLYSLSSVVTVPSSSLGTQTYICNVNHKPSNTKVDK | |
| | KVEPKSCDKTHTCPPCPAPEAAGGPSVFLFPPKPKDTLMISRTPEVTCVVVDV | |
| | SHEDPEVKFNWYVDGVEVHNAKTKPREEQYNSTYRVVSVLTVLHQDWLNGKEY | |
| | KCKVSNKALGAPIEKTISKAKGQPREPQVYTLPPSRDELTKNQVSLWCLVKGF | |
| | YPSDIAVLWESYGTEWASYKTTPPVLDSDGSFFLYSKLTVTKEEWQQGFVFSC | |
| | SVMHEALHNHYTQKSLSLSPGK | |
| 92 | QVQLQQPGAELVKPGASVKLSCKASGYTFTSYWMHWVKQSPGRGLEWIGRSDP | RS9.F6-Fd fused to Fc with |
| | TTGGTNYNEKFKTKATLTVDKPSSTAYMQLSSLTSDDSAVYYCVRTSGTGDYW | LALAPG and hole mutations |
| | GQGTSLTVSSASTKGPSVFPLAPSSKSTSGGTAALGCLVKDYFPEPVTVSWNS | |
| | GALTSGVHTFPAVLQSSGLYSLSSVVTVPSSSLGTQTYICNVNHKPSNTKVDK | |
| | KVEPKSCDKTHTCPPCPAPEAAGGPSVFLFPPKPKDTLMISRTPEVTCVVVDV | |
| | SHEDPEVKFNWYVDGVEVHNAKTKPREEQYNSTYRVVSVLTVLHQDWLNGKEY | |
| | KCKVSNKALGAPIEKTISKAKGQPREPQVYTLPPSRDELTKNQVSLSCAVKGF | |
| | YPSDIAVEWESNGQPENNYKTTPPVLDSDGSFFLVSKLTVDKSRWQQGNVFSC | |
| | SVMHEALHNHYTQKSLSLSPGK | |
| 93 | EVQLQQSGPELVKPGASVKISCKTSGYTLSEYTMHWVIQSHGKSLEWIGGVIP | 3D3.A1-Fd |
| | NSGGTSYNQKFRDKASLTVDKSSSTAYLELRSLTSEDSAVYYCARGDDSYRRG | |
| | YALDYWGQGTSVTVSSASTKGPSVFPLAPSSKSTSGGTAALGCLVKDYFPEPV | |
| | TVSWNSGALTSGVHTFPAVLQSSGLYSLSSVVTVPSSSLGTQTYICNVNHKPS | |
| | NTKVDKKVEPKSCDKTH | |
| 94 | EVQLQQSGPELVKPGASVKISCKTSGYTLSEYTMHWVIQSHGKSLEWIGGVIP | 3D3.A1-Fd fused to Fc with |
| | NSGGTSYNQKFRDKASLTVDKSSSTAYLELRSLTSEDSAVYYCARGDDSYRRG | LALAPG, TfR binding, and |
| | YALDYWGQGTSVTVSSASTKGPSVFPLAPSSKSTSGGTAALGCLVKDYFPEPV | knob mutations |
| | TVSWNSGALTSGVHTFPAVLQSSGLYSLSSVVTVPSSSLGTQTYICNVNHKPS | |
| | NTKVDKKVEPKSCDKTHTCPPCPAPEAAGGPSVFLFPPKPKDTLMISRTPEVT | |
| | CVVVDVSHEDPEVKFNWYVDGVEVHNAKTKPREEQYNSTYRVVSVLTVLHQDW | |
| | LNGKEYKCKVSNKALGAPIEKTISKAKGQPREPQVYTLPPSRDELTKNQVSLW | |
| | CLVKGFYPSDIAVLWESYGTEWASYKTTPPVLDSDGSFFLYSKLTVTKEEWQQ | |
| | GFVFSCSVMHEALHNHYTQKSLSLSPGK | |
| 95 | EVQLQQSGPELVKPGASVKISCKTSGYTLSEYTMHWVIQSHGKSLEWIGGVIP | 3D3.A1-Fd fused to Fc with |
| | PNSGGTSYNQKFRDKASLTVDKSSSTAYLELRSLTSEDSAVYYCARGDDSYRR | LALAPG and hole mutations |
| | GYALDYWGQGTSVTVSSASTKGPSVFPLAPSSKSTSGGTAALGCLVKDYFPEP | |
| | VTVSWNSGALTSGVHTFPAVLQSSGLYSLSSVVTVPSSSLGTQTYICNVNHKP | |
| | SNTKVDKKVEPKSCDKTHTCPPCPAPEAAGGPSVFLFPPKPKDTLMISRTPEV | |
| | TCVVVDVSHEDPEVKFNWYVDGVEVHNAKTKPREEQYNSTYRVVSVLTVLHQD | |
| | WLNGKEYKCKVSNKALGAPIEKTISKAKGQPREPQVYTLPPSRDELTKNQVSL | |
| | SCAVKGFYPSDIAVEWESNGQPENNYKTTPPVLDSDGSFFLVSKLTVDKSRWQ | |
| | QGNVFSCSVMHEALHNHYTQKSLSLSPGK | |
| 96 | MEPLRLLILLFVGELSGAHNTTVFQGVAGQSLQVSCPYDSMKHWGRRKAWCRQ | Human TREM2 protein |
| | LGEKGPCQRVVSTHNLWLLSFLRRWNGSTAITDDTLGGTLTITLRNLQPHDAG | |
| | LYQCQSLHGSEADTLRKVLVEVLADPLDHRDAGDLWFPGESESFEDAHVEHSI | |
| | SRSLLEGEIPFPPTSILLLLACIFLIKILAASALWAAAWHGQKPGTHPPSELD | |
| | CGHDPGYQLQTLPGLRDT | |
| 97 | MMDQARSAFSNLFGGEPLSYTRFSLARQVDGDNSHVEMKLAVDEEENADNNTK | Human transferrin receptor |
| | ANVTKPKRCSGSICYGTIAVIVFFLIGFMIGYLGYCKGVEPKTECERLAGTES | protein 1 (TFR1) |
| | PVREEPGEDFPAARRLYWDDLKRKLSEKLDSTDFTGTIKLLNENSYVPREAGS | |
| | QKDENLALYVENQFREFKLSKVWRDQHFVKIQVKDSAQNSVIIVDKNGRLVYL | |
| | VENPGGYVAYSKAATVTGKLVHANFGTKKDFEDLYTPVNGSIVIVRAGKITFA | |
| | EKVANAESLNAIGVLIYMDQTKFPIVNAELSFFGHAHLGTGDPYTPGFPSFNH | |
| | TQFPPSRSSGLPNIPVQTISRAAAEKLFGNMEGDCPSDWKTDSTCRMVTSESK | |
| | NVKLTVSNVLKEIKILNIFGVIKGFVEPDHYVVVGAQRDAWGPGAAKSGVGTA | |
| | LLLKLAQMFSDMVLKDGFQPSRSIIFASWSAGDFGSVGATEWLEGYLSSLHLK | |
| | AFTYINLDKAVLGTSNFKVSASPLLYTLIEKTMQNVKHPVTGQFLYQDSNWAS | |
| | KVEKLTLDNAAFPFLAYSGIPAVSFCFCEDTDYPYLGTTMDTYKELIERIPEL | |
| | NKVARAAAEVAGQFVIKLTHDVELNLDYERYNSQLLSFVRDLNQYRADIKEMG | |
| | LSLQWLYSARGDFFRATSRLTTDFGNAEKTDRFVMKKLNDRVMRVEYHFLSPY | |
| | VSPKESPFRHVFWGSGSHTLPALLENLKLRKQNNGAFNETLFRNQLALATWTI | |
| | QGAANALSGDVWDIDNEF | |
| 98 | APELLGGPSVFLFPPKPKDTLMISRTPEVTCVVVDVSHEDPEVKFNWYVDGVE | Wild-type human Fc |
| | VHNAKTKPREEQYNSTYRVVSVLTVLHQDWLNGKEYKCKVSNKALPAPIEKTI | sequence |
| | SKAKGQPREPQVYTLPPSRDELTKNQVSLTCLVKGFYPSDIAVEWESNGQPEN | positions 231-447 EU index |
| | NYKTTPPVLDSDGSFFLYSKLTVDKSRWQQGNVFSCSVMHEALHNHYTQKSLS | numbering |
| | LSPGK | |
| 99 | EPKSCDKTHTCPPCP | Human IgG1 hinge sequence |
| 100 | APELLGGPSVFLFPPKPKDTLMISRTPEVTCVVVDVSHEDPEVKFNWYVDGVE | Clone CH3C.35.20 |
| | VHNAKTKPREEQYNSTYRVVSVLTVLHQDWLNGKEYKCKVSNKALPAPIEKTI | |
| | SKAKGQPREPQVYTLPPSRDELTKNQVSLTCLVKGFYPSDIAVEWESYGTEWS | |
| | SYKTTPPVLDSDGSFFLYSKLTVTKEEWQQGFVFSCSVMHEALHNHYTQKSLS | |
| | LSPGK | |
| 101 | APELLGGPSVFLFPPKPKDTLMISRTPEVTCVVVDVSHEDPEVKFNWYVDGVE | Clone CH3C.35.21 |
| | VHNAKTKPREEQYNSTYRVVSVLTVLHQDWLNGKEYKCKVSNKALPAPIEKTI | |
| | SKAKGQPREPQVYTLPPSRDELTKNQVSLTCLVKGFYPSDIAVWWESYGTEWS | |
| | SYKTTPPVLDSDGSFFLYSKLTVTKEEWQQGFVFSCSVMHEALHNHYTQKSLS | |
| | LSPGK | |
| 102 | APELLGGPSVFLFPPKPKDTLMISRTPEVTCVVVDVSHEDPEVKFNWYVDGVE | Clone CH3C.35.22 |
| | VHNAKTKPREEQYNSTYRVVSVLTVLHQDWLNGKEYKCKVSNKALPAPIEKTI | |
| | SKAKGQPREPQVYTLPPSRDELTKNQVSLTCLVKGFYPSDIAVWWESYGTEWS | |
| | NYKTTPPVLDSDGSFFLYSKLTVTKSEWQQGFVFSCSVMHEALHNHYTQKSLS | |
| | LSPGK | |
| 103 | APELLGGPSVFLFPPKPKDTLMISRTPEVTCVVVDVSHEDPEVKFNWYVDGVE | Clone CH3C.35.23 |
| | VHNAKTKPREEQYNSTYRVVSVLTVLHQDWLNGKEYKCKVSNKALPAPIEKTI | |
| | SKAKGQPREPQVYTLPPSRDELTKNQVSLTCLVKGFYPSDIAVEWESYGTEWS | |
| | NYKTTPPVLDSDGSFFLYSKLTVTKEEWQQGFVFSCSVMHEALHNHYTQKSLS | |
| | LSPGK | |
| 104 | APELLGGPSVFLFPPKPKDTLMISRTPEVTCVVVDVSHEDPEVKFNWYVDGVE | Clone CH3C.35.24 |
| | VHNAKTKPREEQYNSTYRVVSVLTVLHQDWLNGKEYKCKVSNKALPAPIEKTI | |
| | SKAKGQPREPQVYTLPPSRDELTKNQVSLTCLVKGFYPSDIAVWWESYGTEWS | |
| | NYKTTPPVLDSDGSFFLYSKLTVTKEEWQQGFVFSCSVMHEALHNHYTQKSLS | |
| | LSPGK | |
| 105 | APELLGGPSVFLFPPKPKDTLMISRTPEVTCVVVDVSHEDPEVKFNWYVDGVE | Clone CH3C.35.21.17 |
| | VHNAKTKPREEQYNSTYRVVSVLTVLHQDWLNGKEYKCKVSNKALPAPIEKTI | |
| | SKAKGQPREPQVYTLPPSRDELTKNQVSLTCLVKGFYPSDIAVLWESYGTEWS | |
| | SYKTTPPVLDSDGSFFLYSKLTVTKEEWQQGFVFSCSVMHEALHNHYTQKSLS | |
| | LSPGK | |
| 106 | APELLGGPSVFLFPPKPKDTLMISRTPEVTCVVVDVSHEDPEVKFNWYVDGVE | Clone CH3C.35.20.1 |
| | VHNAKTKPREEQYNSTYRVVSVLTVLHQDWLNGKEYKCKVSNKALPAPIEKTI | |
| | SKAKGQPREPQVYTLPPSRDELTKNQVSLTCLVKGFYPSDIAVEWESFGTEWS | |
| | SYKTTPPVLDSDGSFFLYSKLTVTKEEWQQGFVFSCSVMHEALHNHYTQKSLS | |
| | LSPGK | |
| 107 | APELLGGPSVFLFPPKPKDTLMISRTPEVTCVVVDVSHEDPEVKFNWYVDGVE | Clone CH3C.35.20.2 |
| | VHNAKTKPREEQYNSTYRVVSVLTVLHQDWLNGKEYKCKVSNKALPAPIEKTI | |
| | SKAKGQPREPQVYTLPPSRDELTKNQVSLTCLVKGFYPSDIAVEWESYGTEWA | |
| | SYKTTPPVLDSDGSFFLYSKLTVTKEEWQQGFVFSCSVMHEALHNHYTQKSLS | |
| | LSPGK | |
| 108 | APELLGGPSVFLFPPKPKDTLMISRTPEVTCVVVDVSHEDPEVKFNWYVDGVE | Clone CH3C.35.20.3 |
| | VHNAKTKPREEQYNSTYRVVSVLTVLHQDWLNGKEYKCKVSNKALPAPIEKTI | |
| | SKAKGQPREPQVYTLPPSRDELTKNQVSLTCLVKGFYPSDIAVEWESYGTEWV | |
| | SYKTTPPVLDSDGSFFLYSKLTVTKEEWQQGFVFSCSVMHEALHNHYTQKSLS | |
| | LSPGK | |
| 109 | APELLGGPSVFLFPPKPKDTLMISRTPEVTCVVVDVSHEDPEVKFNWYVDGVE | Clone CH3C.35.20.4 |
| | VHNAKTKPREEQYNSTYRVVSVLTVLHQDWLNGKEYKCKVSNKALPAPIEKTI | |
| | SKAKGQPREPQVYTLPPSRDELTKNQVSLTCLVKGFYPSDIAVEWESYGTEWS | |
| | SYKTTPPVLDSDGSFFLYSKLTVSKEEWQQGFVFSCSVMHEALHNHYTQKSLS | |
| | LSPGK | |
| 110 | APELLGGPSVFLFPPKPKDTLMISRTPEVTCVVVDVSHEDPEVKFNWYVDGVE | Clone CH3C.35.20.5 |
| | VHNAKTKPREEQYNSTYRVVSVLTVLHQDWLNGKEYKCKVSNKALPAPIEKTI | |
| | SKAKGQPREPQVYTLPPSRDELTKNQVSLTCLVKGFYPSDIAVEWESFGTEWA | |
| | SYKTTPPVLDSDGSFFLYSKLTVTKEEWQQGFVFSCSVMHEALHNHYTQKSLS | |
| | LSPGK | |
| 111 | APELLGGPSVFLFPPKPKDTLMISRTPEVTCVVVDVSHEDPEVKFNWYVDGVE | Clone CH3C.35.20.6 |
| | VHNAKTKPREEQYNSTYRVVSVLTVLHQDWLNGKEYKCKVSNKALPAPIEKTI | |
| | SKAKGQPREPQVYTLPPSRDELTKNQVSLTCLVKGFYPSDIAVEWESFGTEWV | |
| | SYKTTPPVLDSDGSFFLYSKLTVTKEEWQQGFVFSCSVMHEALHNHYTQKSLS | |
| | LSPGK | |
| 112 | APELLGGPSVFLFPPKPKDTLMISRTPEVTCVVVDVSHEDPEVKFNWYVDGVE | Clone CH3C.35.21.a.1 |
| | VHNAKTKPREEQYNSTYRVVSVLTVLHQDWLNGKEYKCKVSNKALPAPIEKTI | |
| | SKAKGQPREPQVYTLPPSRDELTKNQVSLTCLVKGFYPSDIAVWWESFGTEWS | |
| | SYKTTPPVLDSDGSFFLYSKLTVTKEEWQQGFVFSCSVMHEALHNHYTQKSLS | |
| | LSPGK | |
| 113 | APELLGGPSVFLFPPKPKDTLMISRTPEVTCVVVDVSHEDPEVKFNWYVDGVE | Clone CH3C.35.21.a.2 |
| | VHNAKTKPREEQYNSTYRVVSVLTVLHQDWLNGKEYKCKVSNKALPAPIEKTI | |
| | SKAKGQPREPQVYTLPPSRDELTKNQVSLTCLVKGFYPSDIAVWWESYGTEWA | |
| | SYKTTPPVLDSDGSFFLYSKLTVTKEEWQQGFVFSCSVMHEALHNHYTQKSLS | |
| | LSPGK | |
| 114 | APELLGGPSVFLFPPKPKDTLMISRTPEVTCVVVDVSHEDPEVKFNWYVDGVE | Clone CH3C.35.21.a.3 |
| | VHNAKTKPREEQYNSTYRVVSVLTVLHQDWLNGKEYKCKVSNKALPAPIEKTI | |
| | SKAKGQPREPQVYTLPPSRDELTKNQVSLTCLVKGFYPSDIAVWWESYGTEWV | |
| | SYKTTPPVLDSDGSFFLYSKLTVTKEEWQQGFVFSCSVMHEALHNHYTQKSLS | |
| | LSPGK | |
| 115 | APELLGGPSVFLFPPKPKDTLMISRTPEVTCVVVDVSHEDPEVKFNWYVDGVE | Clone CH3C.35.21.a.4 |
| | VHNAKTKPREEQYNSTYRVVSVLTVLHQDWLNGKEYKCKVSNKALPAPIEKTI | |
| | SKAKGQPREPQVYTLPPSRDELTKNQVSLTCLVKGFYPSDIAVWWESYGTEWS | |
| | SYKTTPPVLDSDGSFFLYSKLTVSKEEWQQGFVFSCSVMHEALHNHYTQKSLS | |
| | LSPGK | |
| 116 | APELLGGPSVFLFPPKPKDTLMISRTPEVTCVVVDVSHEDPEVKFNWYVDGVE | Clone CH3C.35.21.a.5 |
| | VHNAKTKPREEQYNSTYRVVSVLTVLHQDWLNGKEYKCKVSNKALPAPIEKTI | |
| | SKAKGQPREPQVYTLPPSRDELTKNQVSLTCLVKGFYPSDIAVWWESFGTEWA | |
| | SYKTTPPVLDSDGSFFLYSKLTVTKEEWQQGFVFSCSVMHEALHNHYTQKSLS | |
| | LSPGK | |
| 117 | APELLGGPSVFLFPPKPKDTLMISRTPEVTCVVVDVSHEDPEVKFNWYVDGVE | Clone CH3C.35.21.a.6 |
| | VHNAKTKPREEQYNSTYRVVSVLTVLHQDWLNGKEYKCKVSNKALPAPIEKTI | |
| | SKAKGQPREPQVYTLPPSRDELTKNQVSLTCLVKGFYPSDIAVWWESFGTEWV | |
| | SYKTTPPVLDSDGSFFLYSKLTVTKEEWQQGFVFSCSVMHEALHNHYTQKSLS | |
| | LSPGK | |
| 118 | APELLGGPSVFLFPPKPKDTLMISRTPEVTCVVVDVSHEDPEVKFNWYVDGVE | Clone CH3C.35.23.1 |
| | VHNAKTKPREEQYNSTYRVVSVLTVLHQDWLNGKEYKCKVSNKALPAPIEKTI | |
| | SKAKGQPREPQVYTLPPSRDELTKNQVSLTCLVKGFYPSDIAVEWESFGTEWS | |
| | NYKTTPPVLDSDGSFFLYSKLTVTKEEWQQGFVFSCSVMHEALHNHYTQKSLS | |
| | LSPGK | |
| 119 | APELLGGPSVFLFPPKPKDTLMISRTPEVTCVVVDVSHEDPEVKFNWYVDGVE | Clone CH3C.35.23.2 |
| | VHNAKTKPREEQYNSTYRVVSVLTVLHQDWLNGKEYKCKVSNKALPAPIEKTI | |
| | SKAKGQPREPQVYTLPPSRDELTKNQVSLTCLVKGFYPSDIAVEWESYGTEWA | |
| | NYKTTPPVLDSDGSFFLYSKLTVTKEEWQQGFVFSCSVMHEALHNHYTQKSLS | |
| | LSPGK | |
| 120 | APELLGGPSVFLFPPKPKDTLMISRTPEVTCVVVDVSHEDPEVKFNWYVDGVE | Clone CH3C.35.23.3 |
| | VHNAKTKPREEQYNSTYRVVSVLTVLHQDWLNGKEYKCKVSNKALPAPIEKTI | |
| | SKAKGQPREPQVYTLPPSRDELTKNQVSLTCLVKGFYPSDIAVEWESYGTEWV | |
| | NYKTTPPVLDSDGSFFLYSKLTVTKEEWQQGFVFSCSVMHEALHNHYTQKSLS | |
| | LSPGK | |
| 121 | APELLGGPSVFLFPPKPKDTLMISRTPEVTCVVVDVSHEDPEVKFNWYVDGVE | Clone CH3C.35.23.4 |
| | VHNAKTKPREEQYNSTYRVVSVLTVLHQDWLNGKEYKCKVSNKALPAPIEKTI | |
| | SKAKGQPREPQVYTLPPSRDELTKNQVSLTCLVKGFYPSDIAVEWESYGTEWS | |
| | NYKTTPPVLDSDGSFFLYSKLTVSKEEWQQGFVFSCSVMHEALHNHYTQKSLS | |
| | LSPGK | |
| 122 | APELLGGPSVFLFPPKPKDTLMISRTPEVTCVVVDVSHEDPEVKFNWYVDGVE | Clone CH3C.35.23.5 |
| | VHNAKTKPREEQYNSTYRVVSVLTVLHQDWLNGKEYKCKVSNKALPAPIEKTI | |
| | SKAKGQPREPQVYTLPPSRDELTKNQVSLTCLVKGFYPSDIAVEWESFGTEWA | |
| | NYKTTPPVLDSDGSFFLYSKLTVTKEEWQQGFVFSCSVMHEALHNHYTQKSLS | |
| | LSPGK | |
| 123 | APELLGGPSVFLFPPKPKDTLMISRTPEVTCVVVDVSHEDPEVKFNWYVDGVE | Clone CH3C.35.23.6 |
| | VHNAKTKPREEQYNSTYRVVSVLTVLHQDWLNGKEYKCKVSNKALPAPIEKTI | |
| | SKAKGQPREPQVYTLPPSRDELTKNQVSLTCLVKGFYPSDIAVEWESFGTEWV | |
| | NYKTTPPVLDSDGSFFLYSKLTVTKEEWQQGFVFSCSVMHEALHNHYTQKSLS | |
| | LSPGK | |
| 124 | APELLGGPSVFLFPPKPKDTLMISRTPEVTCVVVDVSHEDPEVKFNWYVDGVE | Clone CH3C.35.24.1 |
| | VHNAKTKPREEQYNSTYRVVSVLTVLHQDWLNGKEYKCKVSNKALPAPIEKTI | |
| | SKAKGQPREPQVYTLPPSRDELTKNQVSLTCLVKGFYPSDIAVWWESFGTEWS | |
| | NYKTTPPVLDSDGSFFLYSKLTVTKEEWQQGFVFSCSVMHEALHNHYTQKSLS | |
| | LSPGK | |
| 125 | APELLGGPSVFLFPPKPKDTLMISRTPEVTCVVVDVSHEDPEVKFNWYVDGVE | Clone CH3C.35.24.2 |
| | VHNAKTKPREEQYNSTYRVVSVLTVLHQDWLNGKEYKCKVSNKALPAPIEKTI | |
| | SKAKGQPREPQVYTLPPSRDELTKNQVSLTCLVKGFYPSDIAVWWESYGTEWA | |
| | NYKTTPPVLDSDGSFFLYSKLTVTKEEWQQGFVFSCSVMHEALHNHYTQKSLS | |
| | LSPGK | |
| 126 | APELLGGPSVFLFPPKPKDTLMISRTPEVTCVVVDVSHEDPEVKFNWYVDGVE | Clone CH3C.35.24.3 |
| | VHNAKTKPREEQYNSTYRVVSVLTVLHQDWLNGKEYKCKVSNKALPAPIEKTI | |
| | SKAKGQPREPQVYTLPPSRDELTKNQVSLTCLVKGFYPSDIAVWWESYGTEWV | |
| | NYKTTPPVLDSDGSFFLYSKLTVTKEEWQQGFVFSCSVMHEALHNHYTQKSLS | |
| | LSPGK | |
| 127 | APELLGGPSVFLFPPKPKDTLMISRTPEVTCVVVDVSHEDPEVKFNWYVDGVE | Clone CH3C.35.24.4 |
| | VHNAKTKPREEQYNSTYRVVSVLTVLHQDWLNGKEYKCKVSNKALPAPIEKTI | |
| | SKAKGQPREPQVYTLPPSRDELTKNQVSLTCLVKGFYPSDIAVWWESYGTEWS | |
| | NYKTTPPVLDSDGSFFLYSKLTVSKEEWQQGFVFSCSVMHEALHNHYTQKSLS | |
| | LSPGK | |
| 128 | APELLGGPSVFLFPPKPKDTLMISRTPEVTCVVVDVSHEDPEVKFNWYVDGVE | Clone CH3C.35.24.5 |
| | VHNAKTKPREEQYNSTYRVVSVLTVLHQDWLNGKEYKCKVSNKALPAPIEKTI | |
| | SKAKGQPREPQVYTLPPSRDELTKNQVSLTCLVKGFYPSDIAVWWESFGTEWA | |
| | NYKTTPPVLDSDGSFFLYSKLTVTKEEWQQGFVFSCSVMHEALHNHYTQKSLS | |
| | LSPGK | |
| 129 | APELLGGPSVFLFPPKPKDTLMISRTPEVTCVVVDVSHEDPEVKFNWYVDGVE | Clone CH3C.35.24.6 |
| | VHNAKTKPREEQYNSTYRVVSVLTVLHQDWLNGKEYKCKVSNKALPAPIEKTI | |
| | SKAKGQPREPQVYTLPPSRDELTKNQVSLTCLVKGFYPSDIAVWWESFGTEWV | |
| | NYKTTPPVLDSDGSFFLYSKLTVTKEEWQQGFVFSCSVMHEALHNHYTQKSLS | |
| | LSPGK | |
| 130 | APELLGGPSVFLFPPKPKDTLMISRTPEVTCVVVDVSHEDPEVKFNWYVDGVE | Clone CH3C.35.21.17.1 |
| | VHNAKTKPREEQYNSTYRVVSVLTVLHQDWLNGKEYKCKVSNKALPAPIEKTI | |
| | SKAKGQPREPQVYTLPPSRDELTKNQVSLTCLVKGFYPSDIAVLWESFGTEWS | |
| | SYKTTPPVLDSDGSFFLYSKLTVTKEEWQQGFVFSCSVMHEALHNHYTQKSLS | |
| | LSPGK | |
| 131 | APELLGGPSVFLFPPKPKDTLMISRTPEVTCVVVDVSHEDPEVKFNWYVDGVE | Clone CH3C.35.21.17.2 |
| | VHNAKTKPREEQYNSTYRVVSVLTVLHQDWLNGKEYKCKVSNKALPAPIEKTI | |
| | SKAKGQPREPQVYTLPPSRDELTKNQVSLTCLVKGFYPSDIAVLWESYGTEWA | |
| | SYKTTPPVLDSDGSFFLYSKLTVTKEEWQQGFVFSCSVMHEALHNHYTQKSLS | |
| | LSPGK | |
| 132 | APELLGGPSVFLFPPKPKDTLMISRTPEVTCVVVDVSHEDPEVKFNWYVDGVE | Clone CH3C.35.21.17.3 |
| | VHNAKTKPREEQYNSTYRVVSVLTVLHQDWLNGKEYKCKVSNKALPAPIEKTI | |
| | SKAKGQPREPQVYTLPPSRDELTKNQVSLTCLVKGFYPSDIAVLWESYGTEWV | |
| | SYKTTPPVLDSDGSFFLYSKLTVTKEEWQQGFVFSCSVMHEALHNHYTQKSLS | |
| | LSPGK | |
| 133 | APELLGGPSVFLFPPKPKDTLMISRTPEVTCVVVDVSHEDPEVKFNWYVDGVE | Clone CH3C.35.21.17.4 |
| | VHNAKTKPREEQYNSTYRVVSVLTVLHQDWLNGKEYKCKVSNKALPAPIEKTI | |
| | SKAKGQPREPQVYTLPPSRDELTKNQVSLTCLVKGFYPSDIAVLWESYGTEWS | |
| | SYKTTPPVLDSDGSFFLYSKLTVSKEEWQQGFVFSCSVMHEALHNHYTQKSLS | |
| | LSPGK | |
| 134 | APELLGGPSVFLFPPKPKDTLMISRTPEVTCVVVDVSHEDPEVKFNWYVDGVE | Clone CH3C.35.21.17.5 |
| | VHNAKTKPREEQYNSTYRVVSVLTVLHQDWLNGKEYKCKVSNKALPAPIEKTI | |
| | SKAKGQPREPQVYTLPPSRDELTKNQVSLTCLVKGFYPSDIAVLWESFGTEWA | |
| | SYKTTPPVLDSDGSFFLYSKLTVTKEEWQQGFVFSCSVMHEALHNHYTQKSLS | |
| | LSPGK | |
| 135 | APELLGGPSVFLFPPKPKDTLMISRTPEVTCVVVDVSHEDPEVKFNWYVDGVE | Clone CH3C.35.21.17.6 |
| | VHNAKTKPREEQYNSTYRVVSVLTVLHQDWLNGKEYKCKVSNKALPAPIEKTI | |
| | SKAKGQPREPQVYTLPPSRDELTKNQVSLTCLVKGFYPSDIAVLWESFGTEWV | |
| | SYKTTPPVLDSDGSFFLYSKLTVTKEEWQQGFVFSCSVMHEALHNHYTQKSLS | |
| | LSPGK | |
| 136 | APELLGGPSVFLFPPKPKDTLMISRTPEVTCVVVDVSHEDPEVKFNWYVDGVE | Clones CH3C.35.N390 and |
| | VHNAKTKPREEQYNSTYRVVSVLTVLHQDWLNGKEYKCKVSNKALPAPIEKTI | CH3C.35.N163 |
| | SKAKGQPREPQVYTLPPSRDELTKNQVSLTCLVKGFYPSDIAVEWESYGTEWS | |
| | NYKTTPPVLDSDGSFFLYSKLTVTKSEWQQGFVFSCSVMHEALHNHYTQKSLS | |
| | LSPGK | |
| 137 | APELLGGPSVFLFPPKPKDTLMISRTPEVTCVVVDVSHEDPEVKFNWYVDGVE | Clone CH3C.1 |
| | VHNAKTKPREEQYNSTYRVVSVLTVLHQDWLNGKEYKCKVSNKALPAPIEKTI | |
| | SKAKGQPREPQVYTLPPSRDELTKNQVSLTCLVKGFYPSDIAVEWESLGLVWV | |
| | YKTTPPVLDSDGSFFLYSKLTVAKSTWQQGWVFSCSVMHEALHNHYTQKSLS | |
| | LSPGK | |
| 138 | APELLGGPSVFLFPPKPKDTLMISRTPEVTCVVVDVSHEDPEVKFNWYVDGVE | Clone CH3C.2 |
| | VHNAKTKPREEQYNSTYRVVSVLTVLHQDWLNGKEYKCKVSNKALPAPIEKTI | |
| | SKAKGQPREPQVYTLPPSRDELTKNQVSLTCLVKGFYPSDIAVEWESYGTVWS | |
| | HYKTTPPVLDSDGSFFLYSKLTVSKSEWQQGYVFSCSVMHEALHNHYTQKSLS | |
| | LSPGK | |
| 139 | APELLGGPSVFLFPPKPKDTLMISRTPEVTCVVVDVSHEDPEVKFNWYVDGVE | Clone CH3C.3 |
| | VHNAKTKPREEQYNSTYRVVSVLTVLHQDWLNGKEYKCKVSNKALPAPIEKTI | |
| | SKAKGQPREPQVYTLPPSRDELTKNQVSLTCLVKGFYPSDIAVEWESYGTEWS | |
| | QYKTTPPVLDSDGSFFLYSKLTVEKSDWQQGHVFSCSVMHEALHNHYTQKSLS | |
| | LSPGK | |
| 140 | APELLGGPSVFLFPPKPKDTLMISRTPEVTCVVVDVSHEDPEVKFNWYVDGVE | Clone CH3C.4 |
| | VHNAKTKPREEQYNSTYRVVSVLTVLHQDWLNGKEYKCKVSNKALPAPIEKTI | |
| | SKAKGQPREPQVYTLPPSRDELTKNQVSLTCLVKGFYPSDIAVEWESVGTPWA | |
| | LYKTTPPVLDSDGSFFLYSKLTVLKSEWQQGWVFSCSVMHEALHNHYTQKSLS | |
| | LSPGK | |
| 141 | APELLGGPSVFLFPPKPKDTLMISRTPEVTCVVVDVSHEDPEVKFNWYVDGVE | Clone CH3C.17 |
| | VHNAKTKPREEQYNSTYRVVSVLTVLHQDWLNGKEYKCKVSNKALPAPIEKTI | |
| | SKAKGQPREPQVYTLPPSRDELTKNQVSLTCLVKGFYPSDIAVEWESYGTVWS | |
| | KYKTTPPVLDSDGSFFLYSKLTVSKSEWQQGFVFSCSVMHEALHNHYTQKSLS | |
| | LSPGK | |
| 142 | APELLGGPSVFLFPPKPKDTLMISRTPEVTCVVVDVSHEDPEVKFNWYVDGVE | Clone CH3C.18 |
| | VHNAKTKPREEQYNSTYRVVSVLTVLHQDWLNGKEYKCKVSNKALPAPIEKTI | |
| | SKAKGQPREPQVYTLPPSRDELTKNQVSLTCLVKGFYPSDIAVEWESLGHVWA | |
| | VYKTTPPVLDSDGSFFLYSKLTVPKSTWQQGWVFSCSVMHEALHNHYTQKSLS | |
| | LSPGK | |
| 143 | APELLGGPSVFLFPPKPKDTLMISRTPEVTCVVVDVSHEDPEVKFNWYVDGVE | Clone CH3C.21 |
| | VHNAKTKPREEQYNSTYRVVSVLTVLHQDWLNGKEYKCKVSNKALPAPIEKTI | |
| | SKAKGQPREPQVYTLPPSRDELTKNQVSLTCLVKGFYPSDIAVEWESLGLVWV | |
| | YKTTPPVLDSDGSFFLYSKLTVPKSTWQQGWVFSCSVMHEALHNHYTQKSLS | |
| | LSPGK | |
| 144 | APELLGGPSVFLFPPKPKDTLMISRTPEVTCVVVDVSHEDPEVKFNWYVDGVE | Clone CH3C.25 |
| | VHNAKTKPREEQYNSTYRVVSVLTVLHQDWLNGKEYKCKVSNKALPAPIEKTI | |
| | SKAKGQPREPQVYTLPPSRDELTKNQVSLTCLVKGFYPSDIAVEWESMGHVWV | |
| | GYKTTPPVLDSDGSFFLYSKLTVDKSTWQQGWVFSCSVMHEALHNHYTQKSLS | |
| | LSPGK | |
| 145 | APELLGGPSVFLFPPKPKDTLMISRTPEVTCVVVDVSHEDPEVKFNWYVDGVE | Clone CH3C.34 |
| | VHNAKTKPREEQYNSTYRVVSVLTVLHQDWLNGKEYKCKVSNKALPAPIEKTI | |
| | SKAKGQPREPQVYTLPPSRDELTKNQVSLTCLVKGFYPSDIAVEWESLGLVWV | |
| | FSKTTPPVLDSDGSFFLYSKLTVPKSTWQQGWVFSCSVMHEALHNHYTQKSLS | |
| | LSPGK | |
| 146 | APELLGGPSVFLFPPKPKDTLMISRTPEVTCVVVDVSHEDPEVKFNWYVDGVE | Clone CH3C.35 |
| | VHNAKTKPREEQYNSTYRVVSVLTVLHQDWLNGKEYKCKVSNKALPAPIEKTI | |
| | SKAKGQPREPQVYTLPPSRDELTKNQVSLTCLVKGFYPSDIAVEWESYGTEWS | |
| | SYKTTPPVLDSDGSFFLYSKLTVTKSEWQQGFVFSCSVMHEALHNHYTQKSLS | |
| | LSPGK | |
| 147 | APELLGGPSVFLFPPKPKDTLMISRTPEVTCVVVDVSHEDPEVKFNWYVDGVE | Clone CH3C.44 |
| | VHNAKTKPREEQYNSTYRVVSVLTVLHQDWLNGKEYKCKVSNKALPAPIEKTI | |
| | SKAKGQPREPQVYTLPPSRDELTKNQVSLTCLVKGFYPSDIAVEWESYGTEWS | |
| | NYKTTPPVLDSDGSFFLYSKLTVSKSEWQQGFVFSCSVMHEALHNHYTQKSLS | |
| | LSPGK | |
| 148 | APELLGGPSVFLFPPKPKDTLMISRTPEVTCVVVDVSHEDPEVKFNWYVDGVE | Clone CH3C.51 |
| | VHNAKTKPREEQYNSTYRVVSVLTVLHQDWLNGKEYKCKVSNKALPAPIEKTI | |
| | SKAKGQPREPQVYTLPPSRDELTKNQVSLTCLVKGFYPSDIAVEWESLGHVWV | |
| | GYKTTPPVLDSDGSFFLYSKLTVSKSEWQQGWVFSCSVMHEALHNHYTQKSLS | |
| | LSPGK | |
| 149 | APELLGGPSVFLFPPKPKDTLMISRTPEVTCVVVDVSHEDPEVKFNWYVDGVE | Clone CH3C.3.1-3 |
| | VHNAKTKPREEQYNSTYRVVSVLTVLHQDWLNGKEYKCKVSNKALPAPIEKTI | |
| | SKAKGQPREPQVYTLPPSRDELTKNQVSLTCLVKGFYPSDIAVEWESLGHVWV | |
| | ATKTTPPVLDSDGSFFLYSKLTVPKSTWQQGWVFSCSVMHEALHNHYTQKSLS | |
| | LSPGK | |
| 150 | APELLGGPSVFLFPPKPKDTLMISRTPEVTCVVVDVSHEDPEVKFNWYVDGVE | Clone CH3C.3.1-9 |
| | VHNAKTKPREEQYNSTYRVVSVLTVLHQDWLNGKEYKCKVSNKALPAPIEKTI | |
| | SKAKGQPREPQVYTLPPSRDELTKNQVSLTCLVKGFYPSDIAVEWESLGPVWV | |
| | HTKTTPPVLDSDGSFFLYSKLTVPKSTWQQGWVFSCSVMHEALHNHYTQKSLS | |
| | LSPGK | |
| 151 | APELLGGPSVFLFPPKPKDTLMISRTPEVTCVVVDVSHEDPEVKFNWYVDGVE | Clone CH3C.3.2-5 |
| | VHNAKTKPREEQYNSTYRVVSVLTVLHQDWLNGKEYKCKVSNKALPAPIEKTI | |
| | SKAKGQPREPQVYTLPPSRDELTKNQVSLTCLVKGFYPSDIAVEWESLGHVWV | |
| | DQKTTPPVLDSDGSFFLYSKLTVPKSTWQQGWVFSCSVMHEALHNHYTQKSLS | |
| | LSPGK | |
| 152 | APELLGGPSVFLFPPKPKDTLMISRTPEVTCVVVDVSHEDPEVKFNWYVDGVE | Clone CH3C.3.2-19 |
| | VHNAKTKPREEQYNSTYRVVSVLTVLHQDWLNGKEYKCKVSNKALPAPIEKTI | |
| | SKAKGQPREPQVYTLPPSRDELTKNQVSLTCLVKGFYPSDIAVEWESLGHVWV | |
| | NQKTTPPVLDSDGSFFLYSKLTVPKSTWQQGWVFSCSVMHEALHNHYTQKSLS | |
| | LSPGK | |
| 153 | APELLGGPSVFLFPPKPKDTLMISRTPEVTCVVVDVSHEDPEVKFNWYVDGVE | Clone CH3C.3.2-1 |
| | VHNAKTKPREEQYNSTYRVVSVLTVLHQDWLNGKEYKCKVSNKALPAPIEKTI | |
| | SKAKGQPREPQVYTLPPSRDELTKNQVSLTCLVKGFYPSDIAVEWESLGHVWV | |
| | NFKTTPPVLDSDGSFFLYSKLTVPKSTWQQGWVFSCSVMHEALHNHYTQKSLS | |
| | LSPGK | |
| 154 | APELLGGPSVFLFPPKPKDTLMISRTPEVTCVVVDVSHEDPEVKFNWYVDGVE | Clone CH3C.18 variant |
| | VHNAKTKPREEQYNSTYRVVSVLTVLHQDWLNGKEYKCKVSNKALPAPIEKTI | |
| | SKAKGQPREPQVYTLPPSRDELTKNQVSLTCLVKGFYPSDIAVWWESLGHVWA | |
| | VYKTTPPVLDSDGSFFLYSKLTVPKSTWQQGWVFSCSVMHEALHNHYTQKSLS | |
| | LSPGK | |
| 155 | APELLGGPSVFLFPPKPKDTLMISRTPEVTCVVVDVSHEDPEVKFNWYVDGVE | Clone CH3C.18 variant |
| | VHNAKTKPREEQYNSTYRVVSVLTVLHQDWLNGKEYKCKVSNKALPAPIEKTI | |
| | SKAKGQPREPQVYTLPPSRDELTKNQVSLTCLVKGFYPSDIAVLWESLGHVWA | |
| | VYKTTPPVLDSDGSFFLYSKLTVPKSTWQQGWVFSCSVMHEALHNHYTQKSLS | |
| | LSPGK | |
| 156 | APELLGGPSVFLFPPKPKDTLMISRTPEVTCVVVDVSHEDPEVKFNWYVDGVE | Clone CH3C.18 variant |
| | VHNAKTKPREEQYNSTYRVVSVLTVLHQDWLNGKEYKCKVSNKALPAPIEKTI | |
| | SKAKGQPREPQVYTLPPSRDELTKNQVSLTCLVKGFYPSDIAVYWESLGHVWA | |
| | VYKTTPPVLDSDGSFFLYSKLTVPKSTWQQGWVFSCSVMHEALHNHYTQKSLS | |
| | LSPGK | |
| 157 | APELLGGPSVFLFPPKPKDTLMISRTPEVTCVVVDVSHEDPEVKFNWYVDGVE | Clone CH3C.18 variant |
| | VHNAKTKPREEQYNSTYRVVSVLTVLHQDWLNGKEYKCKVSNKALPAPIEKTI | |
| | SKAKGQPREPQVYTLPPSRDELTKNQVSLTCLVKGFYPSDIAVEWESLGHVWA | |
| | VYQTTPPVLDSDGSFFLYSKLTVPKSTWQQGWVFSCSVMHEALHNHYTQKSLS | |
| | LSPGK | |
| 158 | APELLGGPSVFLFPPKPKDTLMISRTPEVTCVVVDVSHEDPEVKFNWYVDGVE | Clone CH3C.18 variant |
| | VHNAKTKPREEQYNSTYRVVSVLTVLHQDWLNGKEYKCKVSNKALPAPIEKTI | |
| | SKAKGQPREPQVYTLPPSRDELTKNQVSLTCLVKGFYPSDIAVEWESLGHVWA | |
| | VYFTTPPVLDSDGSFFLYSKLTVPKSTWQQGWVFSCSVMHEALHNHYTQKSLS | |
| | LSPGK | |
| 159 | APELLGGPSVFLFPPKPKDTLMISRTPEVTCVVVDVSHEDPEVKFNWYVDGVE | Clone CH3C.18 variant |
| | VHNAKTKPREEQYNSTYRVVSVLTVLHQDWLNGKEYKCKVSNKALPAPIEKTI | |
| | SKAKGQPREPQVYTLPPSRDELTKNQVSLTCLVKGFYPSDIAVEWESLGHVWA | |
| | VYHTTPPVLDSDGSFFLYSKLTVPKSTWQQGWVFSCSVMHEALHNHYTQKSLS | |
| | LSPGK | |
| 160 | APELLGGPSVFLFPPKPKDTLMISRTPEVTCVVVDVSHEDPEVKFNWYVDGVE | Clone CH3C.35.13 |
| | VHNAKTKPREEQYNSTYRVVSVLTVLHQDWLNGKEYKCKVSNKALPAPIEKTI | |
| | SKAKGQPREPQVYTLPPSRDELTKNQVSLTCLVKGFYPSDIAVWWESLGHVWA | |
| | VYKTTPPVLDSDGSFFLYSKLTVPKSTWQQGWVFSCSVMHEALHNHYTQKSLS | |
| | LSPGK | |
| 161 | APELLGGPSVFLFPPKPKDTLMISRTPEVTCVVVDVSHEDPEVKFNWYVDGVE | Clone CH3C.35.14 |
| | VHNAKTKPREEQYNSTYRVVSVLTVLHQDWLNGKEYKCKVSNKALPAPIEKTI | |
| | SKAKGQPREPQVYTLPPSRDELTKNQVSLTCLVKGFYPSDIAVEWESLGHVWA | |
| | VYQTTPPVLDSDGSFFLYSKLTVPKSTWQQGWVFSCSVMHEALHNHYTQKSLS | |
| | LSPGK | |
| 162 | APELLGGPSVFLFPPKPKDTLMISRTPEVTCVVVDVSHEDPEVKFNWYVDGVE | Clone CH3C.35.15 |
| | VHNAKTKPREEQYNSTYRVVSVLTVLHQDWLNGKEYKCKVSNKALPAPIEKTI | |
| | SKAKGQPREPQVYTLPPSRDELTKNQVSLTCLVKGFYPSDIAVWWESLGHVWA | |
| | VYQTTPPVLDSDGSFFLYSKLTVPKSTWQQGWVFSCSVMHEALHNHYTQKSLS | |
| | LSPGK | |
| 163 | APELLGGPSVFLFPPKPKDTLMISRTPEVTCVVVDVSHEDPEVKFNWYVDGVE | Clone CH3C.35.16 |
| | VHNAKTKPREEQYNSTYRVVSVLTVLHQDWLNGKEYKCKVSNKALPAPIEKTI | |
| | SKAKGQPREPQVYTLPPSRDELTKNQVSLTCLVKGFYPSDIAVWWESLGHVWV | |
| | NQKTTPPVLDSDGSFFLYSKLTVPKSTWQQGWVFSCSVMHEALHNHYTQKSLS | |
| | LSPGK | |
| 164 | APELLGGPSVFLFPPKPKDTLMISRTPEVTCVVVDVSHEDPEVKFNWYVDGVE | Clone CH3C.35.17 |
| | VHNAKTKPREEQYNSTYRVVSVLTVLHQDWLNGKEYKCKVSNKALPAPIEKTI | |
| | SKAKGQPREPQVYTLPPSRDELTKNQVSLTCLVKGFYPSDIAVEWESLGHVWV | |
| | NQQTTPPVLDSDGSFFLYSKLTVPKSTWQQGWVFSCSVMHEALHNHYTQKSLS | |
| | LSPGK | |
| 165 | APELLGGPSVFLFPPKPKDTLMISRTPEVTCVVVDVSHEDPEVKFNWYVDGVE | Clone CH3C.35.18 |
| | VHNAKTKPREEQYNSTYRVVSVLTVLHQDWLNGKEYKCKVSNKALPAPIEKTI | |
| | SKAKGQPREPQVYTLPPSRDELTKNQVSLTCLVKGFYPSDIAVWWESLGHVWV | |
| | NQQTTPPVLDSDGSFFLYSKLTVPKSTWQQGWVFSCSVMHEALHNHYTQKSLS | |
| | LSPGK | |
| 166 | APELLGGPSVFLFPPKPKDTLMISRTPEVTCVVVDVSHEDPEVKFNWYVDGVE | Clone CH3C.35.19 |
| | VHNAKTKPREEQYNSTYRVVSVLTVLHQDWLNGKEYKCKVSNKALPAPIEKTI | |
| | SKAKGQPREPQVYTLPPSRDELTKNQVSLTCLVKGFYPSDIAVWWESYGTEWS | |
| | SYKTTPPVLDSDGSFFLYSKLTVTKSEWQQGFVFSCSVMHEALHNHYTQKSLS | |
| | LSPGK | |
| 167 | APELLGGPSVFLFPPKPKDTLMISRTPEVTCVVVDVSHEDPEVKFNWYVDGVE | Clone CH3C.35.K165Q |
| | VHNAKTKPREEQYNSTYRVVSVLTVLHQDWLNGKEYKCKVSNKALPAPIEKTI | |
| | SKAKGQPREPQVYTLPPSRDELTKNQVSLTCLVKGFYPSDIAVEWESYGTEWS | |
| | SYQTTPPVLDSDGSFFLYSKLTVTKSEWQQGFVFSCSVMHEALHNHYTQKSLS | |
| | LSPGK | |
| 168 | APELLGGPSVFLFPPKPKDTLMISRTPEVTCVVVDVSHEDPEVKFNWYVDGVE | Clone CH3C.35.N163. |
| | VHNAKTKPREEQYNSTYRVVSVLTVLHQDWLNGKEYKCKVSNKALPAPIEKTI | |
| | SKAKGQPREPQVYTLPPSRDELTKNQVSLTCLVKGFYPSDIAVEWESYGTEWS | K165Q |
| | NYQTTPPVLDSDGSFFLYSKLTVTKSEWQQGFVFSCSVMHEALHNHYTQKSLS | |
| | LSPGK | |
| 169 | APELLGGPSVFLFPPKPKDTLMISRTPEVTCVVVDVSHEDPEVKFNWYVDGVE | Clone CH3C.35.21.1 |
| | VHNAKTKPREEQYNSTYRVVSVLTVLHQDWLNGKEYKCKVSNKALPAPIEKTI | |
| | SKAKGQPREPQVYTLPPSRDELTKNQVSLTCLVKGFYPSDIAVLWESYGTEWS | |
| | SYKTTPPVLDSDGSFFLYSKLTVTKSEWQQGFVFSCSVMHEALHNHYTQKSLS | |
| | LSPGK | |
| 170 | APELLGGPSVFLFPPKPKDTLMISRTPEVTCVVVDVSHEDPEVKFNWYVDGVE | Clone CH3C.35.21.2 |
| | VHNAKTKPREEQYNSTYRVVSVLTVLHQDWLNGKEYKCKVSNKALPAPIEKTI | |
| | SKAKGQPREPQVYTLPPSRDELTKNQVSLTCLVKGFYPSDIAVLWESYGTEWS | |
| | SYRTTPPVLDSDGSFFLYSKLTVTKSEWQQGFVFSCSVMHEALHNHYTQKSLS | |
| | LSPGK | |
| 171 | APELLGGPSVFLFPPKPKDTLMISRTPEVTCVVVDVSHEDPEVKFNWYVDGVE | Clone CH3C.35.21.3 |
| | VHNAKTKPREEQYNSTYRVVSVLTVLHQDWLNGKEYKCKVSNKALPAPIEKTI | |
| | SKAKGQPREPQVYTLPPSRDELTKNQVSLTCLVKGFYPSDIAVLWESYGTEWS | |
| | SYRTTPPVLDSDGSFFLYSKLTVTREEWQQGFVFSCSVMHEALHNHYTQKSLS | |
| | LSPGK | |
| 172 | APELLGGPSVFLFPPKPKDTLMISRTPEVTCVVVDVSHEDPEVKFNWYVDGVE | Clone CH3C.35.21. 4 |
| | VHNAKTKPREEQYNSTYRVVSVLTVLHQDWLNGKEYKCKVSNKALPAPIEKTI | |
| | SKAKGQPREPQVYTLPPSRDELTKNQVSLTCLVKGFYPSDIAVLWESYGTEWS | |
| | SYRTTPPVLDSDGSFFLYSKLTVTGEEWQQGFVFSCSVMHEALHNHYTQKSLS | |
| | LSPGK | |
| 173 | APELLGGPSVFLFPPKPKDTLMISRTPEVTCVVVDVSHEDPEVKFNWYVDGVE | Clone CH3C.35.21. 5 |
| | VHNAKTKPREEQYNSTYRVVSVLTVLHQDWLNGKEYKCKVSNKALPAPIEKTI | |
| | SKAKGQPREPQVYTLPPSRDELTKNQVSLTCLVKGFYPSDIAVLWESYGTEWS | |
| | SYRTTPPVLDSDGSFFLYSKLTVTREEWQQGFVFSCWVMHEALHNHYTQKSLS | |
| | LSPGK | |
| 174 | APELLGGPSVFLFPPKPKDTLMISRTPEVTCVVVDVSHEDPEVKFNWYVDGVE | Clone CH3C.35.21. 6 |
| | VHNAKTKPREEQYNSTYRVVSVLTVLHQDWLNGKEYKCKVSNKALPAPIEKTI | |
| | SKAKGQPREPQVYTLPPSRDELTKNQVSLTCLVKGFYPSDIAVLWESYGTEWS | |
| | SYRTTPPVLDSDGSFFLYSKLTVTKEEWQQGFVFSCWVMHEALHNHYTQKSLS | |
| | LSPGK | |
| 175 | APELLGGPSVFLFPPKPKDTLMISRTPEVTCVVVDVSHEDPEVKFNWYVDGVE | Clone CH3C.35.21. 7 |
| | VHNAKTKPREEQYNSTYRVVSVLTVLHQDWLNGKEYKCKVSNKALPAPIEKTI | |
| | SKAKGQPREPQVYTLPPSRDELTKNQVSLTCLVKGFYPSDIAVLWESYGTEWS | |
| | SYRTTPPVLDSDGSFFLYSKLTVTREEWQQGFVFTCWVMHEALHNHYTQKSLS | |
| | LSPGK | |
| 176 | APELLGGPSVFLFPPKPKDTLMISRTPEVTCVVVDVSHEDPEVKFNWYVDGVE | Clone CH3C.35.21.8 |
| | VHNAKTKPREEQYNSTYRVVSVLTVLHQDWLNGKEYKCKVSNKALPAPIEKTI | |
| | SKAKGQPREPQVYTLPPSRDELTKNQVSLTCLVKGFYPSDIAVLWESYGTEWS | |
| | SYRTTPPVLDSDGSFFLYSKLTVTREEWQQGFVFTCGVMHEALHNHYTQKSLS | |
| | LSPGK | |
| 177 | APELLGGPSVFLFPPKPKDTLMISRTPEVTCVVVDVSHEDPEVKFNWYVDGVE | Clone CH3C.35.21.9 |
| | VHNAKTKPREEQYNSTYRVVSVLTVLHQDWLNGKEYKCKVSNKALPAPIEKTI | |
| | SKAKGQPREPQVYTLPPSRDELTKNQVSLTCLVKGFYPSDIAVLWESYGTEWS | |
| | SYRTTPPVLDSDGSFFLYSKLTVTREEWQQGFVFECWVMHEALHNHYTQKSLS | |
| | LSPGK | |
| 178 | APELLGGPSVFLFPPKPKDTLMISRTPEVTCVVVDVSHEDPEVKFNWYVDGVE | Clone CH3C.35.21.10 |
| | VHNAKTKPREEQYNSTYRVVSVLTVLHQDWLNGKEYKCKVSNKALPAPIEKTI | |
| | SKAKGQPREPQVYTLPPSRDELTKNQVSLTCLVKGFYPSDIAVLWESYGTEWS | |
| | SYRTTPPVLDSDGSFFLYSKLTVTREEWQQGFVFKCWVMHEALHNHYTQKSLS | |
| | LSPGK | |
| 179 | APELLGGPSVFLFPPKPKDTLMISRTPEVTCVVVDVSHEDPEVKFNWYVDGVE | Clone CH3C.35.21.11 |
| | VHNAKTKPREEQYNSTYRVVSVLTVLHQDWLNGKEYKCKVSNKALPAPIEKTI | |
| | SKAKGQPREPQVYTLPPSRDELTKNQVSLTCLVKGFYPSDIAVLWESYGTEWS | |
| | SYRTTPPVLDSDGSFFLYSKLTVTPEEWQQGFVFKCWVMHEALHNHYTQKSLS | |
| | LSPGK | |
| 180 | APELLGGPSVFLFPPKPKDTLMISRTPEVTCVVVDVSHEDPEVKFNWYVDGVE | Clone CH3C.35.21.12 |
| | VHNAKTKPREEQYNSTYRVVSVLTVLHQDWLNGKEYKCKVSNKALPAPIEKTI | |
| | SKAKGQPREPQVYTLPPSRDELTKNQVSLTCLVKGFYPSDIAVWWESYGTEWS | |
| | SYRTTPPVLDSDGSFFLYSKLTVTREEWQQGFVFSCSVMHEALHNHYTQKSLS | |
| | LSPGK | |
| 181 | APELLGGPSVFLFPPKPKDTLMISRTPEVTCVVVDVSHEDPEVKFNWYVDGVE | Clone CH3C.35.21.13 |
| | VHNAKTKPREEQYNSTYRVVSVLTVLHQDWLNGKEYKCKVSNKALPAPIEKTI | |
| | SKAKGQPREPQVYTLPPSRDELTKNQVSLTCLVKGFYPSDIAVWWESYGTEWS | |
| | SYRTTPPVLDSDGSFFLYSKLTVTGEEWQQGFVFSCSVMHEALHNHYTQKSLS | |
| | LSPGK | |
| 182 | APELLGGPSVFLFPPKPKDTLMISRTPEVTCVVVDVSHEDPEVKFNWYVDGVE | Clone CH3C.35.21.14 |
| | VHNAKTKPREEQYNSTYRVVSVLTVLHQDWLNGKEYKCKVSNKALPAPIEKTI | |
| | SKAKGQPREPQVYTLPPSRDELTKNQVSLTCLVKGFYPSDIAVWWESYGTEWS | |
| | SYRTTPPVLDSDGSFFLYSKLTVTREEWQQGFVFTCWVMHEALHNHYTQKSLS | |
| | LSPGK | |
| 183 | APELLGGPSVFLFPPKPKDTLMISRTPEVTCVVVDVSHEDPEVKFNWYVDGVE | Clone CH3C.35.21.15 |
| | VHNAKTKPREEQYNSTYRVVSVLTVLHQDWLNGKEYKCKVSNKALPAPIEKTI | |
| | SKAKGQPREPQVYTLPPSRDELTKNQVSLTCLVKGFYPSDIAVWWESYGTEWS | |
| | SYRTTPPVLDSDGSFFLYSKLTVTGEEWQQGFVFTCWVMHEALHNHYTQKSLS | |
| | LSPGK | |
| 184 | APELLGGPSVFLFPPKPKDTLMISRTPEVTCVVVDVSHEDPEVKFNWYVDGVE | Clone CH3C.35.21.16 |
| | VHNAKTKPREEQYNSTYRVVSVLTVLHQDWLNGKEYKCKVSNKALPAPIEKTI | |
| | SKAKGQPREPQVYTLPPSRDELTKNQVSLTCLVKGFYPSDIAVWWESYGTEWS | |
| | SYRTTPPVLDSDGSFFLYSKLTVTREEWQQGFVFTCGVMHEALHNHYTQKSLS | |
| | LSPGK | |
| 185 | APELLGGPSVFLFPPKPKDTLMISRTPEVTCVVVDVSHEDPEVKFNWYVDGVE | Clone CH3C.35.21.18 |
| | VHNAKTKPREEQYNSTYRVVSVLTVLHQDWLNGKEYKCKVSNKALPAPIEKTI | |
| | SKAKGQPREPQVYTLPPSRDELTKNQVSLTCLVKGFYPSDIAVLWESYGTEWS | |
| | SYRTTPPVLDSDGSFFLYSKLTVTKEEWQQGFVFSCSVMHEALHNHYTQKSLS | |
| | LSPGK | |
| 186 | APELLGGPSVFLFPPKPKDTLMISRTPEVTCVVVDVSHEDPEVKFNWYVDGVE | Clone CH3B.1 |
| | VHNAKTKPREEQYNSTYRVVSVLTVLHQDWLNGKEYKCKVSNKALPAPIEKTI | |
| | SKAKGQPRFDYVTTLPPSRDELTKNQVSLTCLVKGFYPSDIAVEWESNGQPEN | |
| | NYKTTPPVLDSDGSFFLYSKLTVDKSRWQQGNVFSCSVMHEALHNHYGFHDLS | |
| | LSPGK | |
| 187 | APELLGGPSVFLFPPKPKDTLMISRTPEVTCVVVDVSHEDPEVKFNWYVDGVE | Clone CH3B.2 |
| | VHNAKTKPREEQYNSTYRVVSVLTVLHQDWLNGKEYKCKVSNKALPAPIEKTI | |
| | SKAKGQPRFDMVTTLPPSRDELTKNQVSLTCLVKGFYPSDIAVEWESNGQPEN | |
| | NYKTTPPVLDSDGSFFLYSKLTVDKSRWQQGNVFSCSVMHEALHNHYGFHDLS | |
| | LSPGK | |
| 188 | APELLGGPSVFLFPPKPKDTLMISRTPEVTCVVVDVSHEDPEVKFNWYVDGVE | Clone CH3B.3 |
| | VHNAKTKPREEQYNSTYRVVSVLTVLHQDWLNGKEYKCKVSNKALPAPIEKTI | |
| | SKAKGQPRFEYVTTLPPSRDELTKNQVSLTCLVKGFYPSDIAVEWESNGQPEN | |
| | NYKTTPPVLDSDGSFFLYSKLTVDKSRWQQGNVFSCSVMHEALHNHYGFHDLS | |
| | LSPGK | |
| 189 | APELLGGPSVFLFPPKPKDTLMISRTPEVTCVVVDVSHEDPEVKFNWYVDGVE | Clone CH3B.4 |
| | VHNAKTKPREEQYNSTYRVVSVLTVLHQDWLNGKEYKCKVSNKALPAPIEKTI | |
| | SKAKGQPRFEMVTTLPPSRDELTKNQVSLTCLVKGFYPSDIAVEWESNGQPEN | |
| | NYKTTPPVLDSDGSFFLYSKLTVDKSRWQQGNVFSCSVMHEALHNHYGFHDLS | |
| | LSPGK | |
| 190 | APELLGGPSVFLFPPKPKDTLMISRTPEVTCVVVDVSHEDPEVKFNWYVDGVE | Clone CH3B.5 |
| | VHNAKTKPREEQYNSTYRVVSVLTVLHQDWLNGKEYKCKVSNKALPAPIEKTI | |
| | SKAKGQPRFELVTTLPPSRDELTKNQVSLTCLVKGFYPSDIAVEWESNGQPEN | |
| | NYKTTPPVLDSDGSFFLYSKLTVDKSRWQQGNVFSCSVMHEALHNHYGFHDLS | |
| | LSPGK | |
| 191 | APELLGGPSVFLFPPKPKDTLMISRTPEVTCVVVDVSHEDPEVEFIWYVDGVD | Clone CH2A2.1 |
| | VRYEWQLPREEQYNSTYRVVSVLTVLHQDWLNGKEYKCKVSNKALPAPIEKTI | |
| | SKAKGQPREPQVYTLPPSRDELTKNQVSLTCLVKGFYPSDIAVEWESNGQPEN | |
| | NYKTTPPVLDSDGSFFLYSKLTVDKSRWQQGNVFSCSVMHEALHNHYTQKSLS | |
| | LSPGK | |
| 192 | APELLGGPSVFLFPPKPKDTLMISRTPEVTCVVVDVSHEDPEVGFVWYVDGVP | Clone CH2A2.2 |
| | VSWEWYWPREEQYNSTYRVVSVLTVLHQDWLNGKEYKCKVSNKALPAPIEKTI | |
| | SKAKGQPREPQVYTLPPSRDELTKNQVSLTCLVKGFYPSDIAVEWESNGQPEN | |
| | NYKTTPPVLDSDGSFFLYSKLTVDKSRWQQGNVFSCSVMHEALHNHYTQKSLS | |
| | LSPGK | |
| 193 | APELLGGPSVFLFPPKPKDTLMISRTPEVTCVVVDVSHEDPEVQFDWYVDGVM | Clone CH2A2.3 |
| | VRREWHRPREEQYNSTYRVVSVLTVLHQDWLNGKEYKCKVSNKALPAPIEKTI | |
| | SKAKGQPREPQVYTLPPSRDELTKNQVSLTCLVKGFYPSDIAVEWESNGQPEN | |
| | NYKTTPPVLDSDGSFFLYSKLTVDKSRWQQGNVFSCSVMHEALHNHYTQKSLS | |
| | LSPGK | |
| 194 | APELLGGPSVFLFPPKPKDTLMISRTPEVTCVVVDVSHEDPEVSFEWYVDGVP | Clone CH2A2.4 |
| | VRWEWQWPREEQYNSTYRVVSVLTVLHQDWLNGKEYKCKVSNKALPAPIEKTI | |
| | SKAKGQPREPQVYTLPPSRDELTKNQVSLTCLVKGFYPSDIAVEWESNGQPEN | |
| | NYKTTPPVLDSDGSFFLYSKLTVDKSRWQQGNVFSCSVMHEALHNHYTQKSLS | |
| | LSPGK | |
| 195 | APELLGGPSVFLFPPKPKDTLMISRTPEVTCVVVDVSHEDPEVAFTWYVDGVP | Clone CH2A2.5 |
| | VRWEWQNPREEQYNSTYRVVSVLTVLHQDWLNGKEYKCKVSNKALPAPIEKTI | |
| | SKAKGQPREPQVYTLPPSRDELTKNQVSLTCLVKGFYPSDIAVEWESNGQPEN | |
| | NYKTTPPVLDSDGSFFLYSKLTVDKSRWQQGNVFSCSVMHEALHNHYTQKSLS | |
| | LSPGK | |
| 196 | APELLGGPSVFLFPPKPKDTLMISRTPEVTCVVVDPQTPPWEVKFNWYVDGVE | Clone CH2C.1 |
| | VHNAKTKPREEEYYTYYRVVSVLTVLHQDWLNGKEYKCKVSNKALPAPIEKTI | |
| | SKAKGQPREPQVYTLPPSRDELTKNQVSLTCLVKGFYPSDIAVEWESNGQPEN | |
| | NYKTTPPVLDSDGSFFLYSKLTVDKSRWQQGNVFSCSVMHEALHNHYTQKSLS | |
| | LSPGK | |
| 197 | APELLGGPSVFLFPPKPKDTLMISRTPEVTCVVVDPPSPPWEVKFNWYVDGVE | Clone CH2C.2 |
| | VHNAKTKPREEEYYSNYRVVSVLTVLHQDWLNGKEYKCKVSNKALPAPIEKTI | |
| | SKAKGQPREPQVYTLPPSRDELTKNQVSLTCLVKGFYPSDIAVEWESNGQPEN | |
| | NYKTTPPVLDSDGSFFLYSKLTVDKSRWQQGNVFSCSVMHEALHNHYTQKSLS | |
| | LSPGK | |
| 198 | APELLGGPSVFLFPPKPKDTLMISRTPEVTCVVVDPQTPPWEVKFNWYVDGVE | Clone CH2C.3 |
| | VHNAKTKPREEEYYSNYRVVSVLTVLHQDWLNGKEYKCKVSNKALPAPIEKTI | |
| | SKAKGQPREPQVYTLPPSRDELTKNQVSLTCLVKGFYPSDIAVEWESNGQPEN | |
| | NYKTTPPVLDSDGSFFLYSKLTVDKSRWQQGNVFSCSVMHEALHNHYTQKSLS | |
| | LSPGK | |
| 199 | APELLGGPSVFLFPPKPKDTLMISRTPEVTCVVVDFRGPPWEVKFNWYVDGVE | Clone CH2C.4 |
| | VHNAKTKPREEEYYHDYRVVSVLTVLHQDWLNGKEYKCKVSNKALPAPIEKTI | |
| | SKAKGQPREPQVYTLPPSRDELTKNQVSLTCLVKGFYPSDIAVEWESNGQPEN | |
| | NYKTTPPVLDSDGSFFLYSKLTVDKSRWQQGNVFSCSVMHEALHNHYTQKSLS | |
| | LSPGK | |
| 200 | APELLGGPSVFLFPPKPKDTLMISRTPEVTCVVVDPQTVPWEVKFNWYVDGVE | Clone CH2C.5 |
| | VHNAKTKPREEEYYSNYRVVSVLTVLHQDWLNGKEYKCKVSNKALPAPIEKTI | |
| | SKAKGQPREPQVYTLPPSRDELTKNQSLTCLVKGFYPSDIAVEWESNGQPEN | |
| | NYKTTPPVLDSDGSFFLYSKLTVDKSRWQQGNVFSCSVMHEALHNHYTQKSLS | |
| | LSPGK | |
| 201 | APELLGGPSVFLFPPKPKDTLMISRTPEVTCVVVDVSVPPRMVKFNWYVDGVE | Clone CH2D.1 |
| | VHNAKTKSLTSQHNSTVRVVSVLTVLHQDWLNGKEYKCKVSNKALPAPIEKTI | |
| | SKAKGQPREPQVYTLPPSRDELTKNQVSLTCLVKGFYPSDIAVEWESNGQPEN | |
| | NYKTTPPVLDSDGSFFLYSKLTVDKSRWQQGNVFSCSVMHEALHNHYTQKSLS | |
| | LSPGK | |
| 202 | APELLGGPSVFLFPPKPKDTLMISRTPEVTCVVVDVSVPPWMVKFNWYVDGVE | Clone CH2D.2 |
| | VHNAKTKSLTSQHNSTVRVVSVLTVLHQDWLNGKEYKCKVSNKALPAPIEKTI | |
| | SKAKGQPREPQVYTLPPSRDELTKNQVSLTCLVKGFYPSDIAVEWESNGQPEN | |
| | NYKTTPPVLDSDGSFFLYSKLTVDKSRWQQGNVFSCSVMHEALHNHYTQKSLS | |
| | LSPGK | |
| 203 | APELLGGPSVFLFPPKPKDTLMISRTPEVTCVVVDVSDMWEYVKFNWYVDGVE | Clone CH2D.3 |
| | VHNAKTKPWVKQLNSTWRVVSVLTVLHQDWLNG KEYKCKVSNKALPAPIEKTI | |
| | SKAKGQPREPQVYTLPPSRDELTKNQVSLTCLVKGFYPSDIAVEWESNGQPEN | |
| | NYKTTPPVLDSDGSFFLYSKLTVDKSRWQQGNVFSCSVMHEALHNHYTQKSLS | |
| | LSPGK | |
| 204 | APELLGGPSVFLFPPKPKDTLMISRTPEVTCVVVDVSDDWTWVKFNWYVDGVE | Clone CH2D.4 |
| | VHNAKTKPWIAQPNSTWRVVSVLTVLHQDWLNGKEYKCKVSNKALPAPIEKTI | |
| | SKAKGQPREPQVYTLPPSRDELTKNQVSLTCLVKGFYPSDIAVEWESNGQPEN | |
| | NYKTTPPVLDSDGSFFLYSKLTVDKSRWQQGNVFSCSVMHEALHNHYTQKSLS | |
| | LSPGK | |
| 205 | APELLGGPSVFLFPPKPKDTLMISRTPEVTCVVVDVSDDWEWVKFNWYVDGVE | Clone CH2D.5 |
| | VHNAKTKPWKLQLNSTWRVVSVLTVLHQDWLNGKEYKCKVSNKALPAPIEKTI | |
| | SKAKGQPREPQVYTLPPSRDELTKNQVSLTCLVKGFYPSDIAVEWESNGQPEN | |
| | NYKTTPPVLDSDGSFFLYSKLTVDKSRWQQGNVFSCSVMHEALHNHYTQKSLS | |
| | LSPGK | |
| 206 | APELLGGPSVFLFPPKPKDTLMISRTPEVTCVVVDVSHEDPWVWFYWYVDGVE | Clone CH2E3.1 |
| | VHNAKTKPREEQYNSTYRVVSVLTVLHQDWLNGKEYKCSVVNIALWWSIEKTI | |
| | SKAKGQPREPQVYTLPPSRDELTKNQVSLTCLVKGFYPSDIAVEWESNGQPEN | |
| | NYKTTPPVLDSDGSFFLYSKLTVDKSRWQQGNVFSCSVMHEALHNHYTQKSLS | |
| | LSPGK | |
| 207 | APELLGGPSVFLFPPKPKDTLMISRTPEVTCVVVDVSHEDPVVGFRWYVDGVE | Clone CH2E3.2 |
| | VHNAKTKPREEQYNSTYRVVSVLTVLHQDWLNGKEYKCRVSNSALTWKIEKTI | |
| | SKAKGQPREPQVYTLPPSRDELTKNQVSLTCLVKGFYPSDIAVEWESNGQPEN | |
| | NYKTTPPVLDSDGSFFLYSKLTVDKSRWQQGNVFSCSVMHEALHNHYTQKSLS | |
| | LSPGK | |
| 208 | APELLGGPSVFLFPPKPKDTLMISRTPEVTCVVVDVSHEDPVVGFRWYVDGVE | Clone CH2E3.3 |
| | VHNAKTKPREEQYNSTYRVVSVLTVLHQDWLNGKEYKCRVSNSALSWRIEKTI | |
| | SKAKGQPREPQVYTLPPSRDELTKNQVSLTCLVKGFYPSDIAVEWESNGQPEN | |
| | NYKTTPPVLDSDGSFFLYSKLTVDKSRWQQGNVFSCSVMHEALHNHYTQKSLS | |
| | LSPGK | |
| 209 | APELLGGPSVFLFPPKPKDTLMISRTPEVTCVVVDVSHEDPIVGFRWYVDGVE | Clone CH2E3.4 |
| | VHNAKTKPREEQYNSTYRVVSVLTVLHQDWLNGKEYKCRVSNSALRWRIEKTI | |
| | SKAKGQPREPQVYTLPPSRDELTKNQVSLTCLVKGFYPSDIAVEWESNGQPEN | |
| | NYKTTPPVLDSDGSFFLYSKLTVDKSRWQQGNVFSCSVMHEALHNHYTQKSLS | |
| | LSPGK | |
| 210 | APELLGGPSVFLFPPKPKDTLMISRTPEVTCVVVDVSHEDPAVGFEWYVDGVE | Clone CH2E3.5 |
| | VHNAKTKPREEQYNSTYRVVSVLTVLHQDWLNGKEYKCQVFNWALDWVIEKTI | |
| | SKAKGQPREPQVYTLPPSRDELTKNQVSLTCLVKGFYPSDIAVEWESNGQPEN | |
| | NYKTTPPVLDSDGSFFLYSKLTVDKSRWQQGNVFSCSVMHEALHNHYTQKSLS | |
| | LSPGK | |
| 211 | APELLGGPSVFLFPPKPKDTLMISRTPEVTCVVVDVSHEDPEVKFNWYVDGVE | Fc sequence with hole |
| | VHNAKTKPREEQYNSTYRVVSVLTVLHQDWLNGKEYKCKVSNKALPAPIEKTI | mutations |
| | SKAKGQPREPQVYTLPPSRDELTKNQVSLSCAVKGFYPSDIAVEWESNGQPEN | |
| | NYKTTPPVLDSDGSFFLVSKLTVDKSRWQQGNVFSCSVMHEALHNHYTQKSLS | |
| | LSPGK | |
| 212 | APEAAGGPSVFLFPPKPKDTLMISRTPEVTCVVVDVSHEDPEVKFNWYVDGVE | Fc sequence with hole and |
| | VHNAKTKPREEQYNSTYRVVSVLTVLHQDWLNGKEYKCKVSNKALPAPIEKTI | LALA mutations |
| | SKAKGQPREPQVYTLPPSRDELTKNQVSLSCAVKGFYPSDIAVEWESNGQPEN | |
| | NYKTTPPVLDSDGSFFLVSKLTVDKSRWQQGNVFSCSVMHEALHNHYTQKSLS | |
| | LSPGK | |
| 213 | APELLGGPSVFLFPPKPKDTLYITREPEVTCVVVDVSHEDPEVKFNWYVDGVE | Fc sequence with hole and |
| | VHNAKTKPREEQYNSTYRVVSVLTVLHQDWLNGKEYKCKVSNKALPAPIEKTI | YTE mutations |
| | SKAKGQPREPQVYTLPPSRDELTKNQVSLSCAVKGFYPSDIAVEWESNGQPEN | |
| | NYKTTPPVLDSDGSFFLVSKLTVDKSRWQQGNVFSCSVMHEALHNHYTQKSLS | |
| | LSPGK | |
| 214 | APEAAGGPSVFLFPPKPKDTLYITREPEVTCVVVDVSHEDPEVKFNWYVDGVE | Fc sequence with hole, |
| | VHNAKTKPREEQYNSTYRVVSVLTVLHQDWLNGKEYKCKVSNKALPAPIEKTI | LALA, and YTE mutations |
| | SKAKGQPREPQVYTLPPSRDELTKNQVSLSCAVKGFYPSDIAVEWESNGQPEN | |
| | NYKTTPPVLDSDGSFFLVSKLTVDKSRWQQGNVFSCSVMHEALHNHYTQKSLS | |
| | LSPGK | |
| 215 | APELLGGPSVFLFPPKPKDTLMISRTPEVTCVVVDVSHEDPEVKFNWYVDGVE | Fc sequence with knob |
| | VHNAKTKPREEQYNSTYRVVSVLTVLHQDWLNGKEYKCKVSNKALPAPIEKTI | mutation |
| | SKAKGQPREPQVYTLPPSRDELTKNQVSLWCLVKGFYPSDIAVEWESNGQPEN | |
| | NYKTTPPVLDSDGSFFLYSKLTVDKSRWQQGNVFSCSVMHEALHNHYTQKSLS | |
| | LSPGK | |
| 216 | APEAAGGPSVFLFPPKPKDTLMISRTPEVTCVVVDVSHEDPEVKFNWYVDGVE | Fc sequence with knob and |
| | VHNAKTKPREEQYNSTYRVVSVLTVLHQDWLNGKEYKCKVSNKALPAPIEKTI | LALA mutations |
| | SKAKGQPREPQVYTLPPSRDELTKNQVSLWCLVKGFYPSDIAVEWESNGQPEN | |
| | NYKTTPPVLDSDGSFFLYSKLTVDKSRWQQGNVFSCSVMHEALHNHYTQKSLS | |
| | LSPGK | |
| 217 | APELLGGPSVFLFPPKPKDTLYITREPEVTCVVVDVSHEDPEVKFNWYVDGVE | Fc sequence with knob and |
| | VHNAKTKPREEQYNSTYRVVSVLTVLHQDWLNGKEYKCKVSNKALPAPIEKTI | YTE mutations |
| | SKAKGQPREPQVYTLPPSRDELTKNQVSLWCLVKGFYPSDIAVEWESNGQPEN | |
| | NYKTTPPVLDSDGSFFLYSKLTVDKSRWQQGNVFSCSVMHEALHNHYTQKSLS | |
| | LSPGK | |
| 218 | APEAAGGPSVFLFPPKPKDTLYITREPEVTCVVVDVSHEDPEVKFNWYVDGVE | Fc sequence with knob, |
| | VHNAKTKPREEQYNSTYRVVSVLTVLHQDWLNGKEYKCKVSNKALPAPIEKTI | LALA, and YTE mutations |
| | SKAKGQPREPQVYTLPPSRDELTKNQVSLWCLVKGFYPSDIAVEWESNGQPEN | |
| | NYKTTPPVLDSDGSFFLYSKLTVDKSRWQQGNVFSCSVMHEALHNHYTQKSLS | |
| | LSPGK | |
| 219 | APELLGGPSVFLFPPKPKDTLMISRTPEVTCVVVDVSHEDPEVKFNWYVDGVE | Clone CH3C.35.21 with knob |
| | VHNAKTKPREEQYNSTYRVVSVLTVLHQDWLNGKEYKCKVSNKALPAPIEKTI | mutation |
| | SKAKGQPREPQVYTLPPSRDELTKNQVSLWCLVKGFYPSDIAVWWESYGTEWS | |
| | SYKTTPPVLDSDGSFFLYSKLTVTKEEWQQGFVFSCSVMHEALHNHYTQKSLS | |
| | LSPGK | |
| 220 | APEAAGGPSVFLFPPKPKDTLMISRTPEVTCVVVDVSHEDPEVKFNWYVDGVE | Clone CH3C.35.21 with knob |
| | VHNAKTKPREEQYNSTYRVVSVLTVLHQDWLNGKEYKCKVSNKALPAPIEKTI | and LALA mutations |
| | SKAKGQPREPQVYTLPPSRDELTKNQVSLWCLVKGFYPSDIAVWWESYGTEWS | |
| | SYKTTPPVLDSDGSFFLYSKLTVTKEEWQQGFVFSCSVMHEALHNHYTQKSLS | |
| | LSPGK | |
| 221 | APELLGGPSVFLFPPKPKDTLYITREPEVTCVVVDVSHEDPEVKFNWYVDGVE | Clone CH3C.35.21 with knob |
| | VHNAKTKPREEQYNSTYRVVSVLTVLHQDWLNGKEYKCKVSNKALPAPIEKTI | and YTE mutations |
| | SKAKGQPREPQVYTLPPSRDELTKNQVSLWCLVKGFYPSDIAVWWESYGTEWS | |
| | SYKTTPPVLDSDGSFFLYSKLTVTKEEWQQGFVFSCSVMHEALHNHYTQKSLS | |
| | LSPGK | |
| 222 | APEAAGGPSVFLFPPKPKDTLYITREPEVTCVVVDVSHEDPEVKFNWYVDGVE | Clone CH3C.35.21 with |
| | VHNAKTKPREEQYNSTYRVVSVLTVLHQDWLNGKEYKCKVSNKALPAPIEKTI | knob, LALA, and YTE |
| | SKAKGQPREPQVYTLPPSRDELTKNQVSLWCLVKGFYPSDIAVWWESYGTEWS | mutations |
| | SYKTTPPVLDSDGSFFLYSKLTVTKEEWQQGFVFSCSVMHEALHNHYTQKSLS | |
| | LSPGK | |
| 223 | APELLGGPSVFLFPPKPKDTLMISRTPEVTCVVVDVSHEDPEVKFNWYVDGVE | Clone CH3C.35.21 with hole |
| | VHNAKTKPREEQYNSTYRVVSVLTVLHQDWLNGKEYKCKVSNKALPAPIEKTI | mutations |
| | SKAKGQPREPQVYTLPPSRDELTKNQVSLSCAVKGFYPSDIAVWWESYGTEWS | |
| | SYKTTPPVLDSDGSFFLVSKLTVTKEEWQQGFVFSCSVMHEALHNHYTQKSLS | |
| | LSPGK | |
| 224 | APEAAGGPSVFLFPPKPKDTLMISRTPEVTCVVVDVSHEDPEVKFNWYVDGVE | Clone CH3C.35.21 with hole |
| | VHNAKTKPREEQYNSTYRVVSVLTVLHQDWLNGKEYKCKVSNKALPAPIEKTI | and LALA mutations |
| | SKAKGQPREPQVYTLPPSRDELTKNQVSLSCAVKGFYPSDIAVWWESYGTEWS | |
| | SYKTTPPVLDSDGSFFLVSKLTVTKEEWQQGFVFSCSVMHEALHNHYTQKSLS | |
| | LSPGK | |
| 225 | APELLGGPSVFLFPPKPKDTLYITREPEVTCVVVDVSHEDPEVKFNWYVDGVE | Clone CH3C.35.21 with hole |
| | VHNAKTKPREEQYNSTYRVVSVLTVLHQDWLNGKEYKCKVSNKALPAPIEKTI | and YTE mutations |
| | SKAKGQPREPQVYTLPPSRDELTKNQVSLSCAVKGFYPSDIAVWWESYGTEWS | |
| | SYKTTPPVLDSDGSFFLVSKLTVTKEEWQQGFVFSCSVMHEALHNHYTQKSLS | |
| | LSPGK | |
| 226 | APEAAGGPSVFLFPPKPKDTLYITREPEVTCVVVDVSHEDPEVKFNWYVDGVE | Clone CH3C.35.21 with hole, |
| | VHNAKTKPREEQYNSTYRVVSVLTVLHQDWLNGKEYKCKVSNKALPAPIEKTI | LALA, and YTE mutations |
| | SKAKGQPREPQVYTLPPSRDELTKNQVSLSCAVKGFYPSDIAVWWESYGTEWS | |
| | SYKTTPPVLDSDGSFFLVSKLTVTKEEWQQGFVFSCSVMHEALHNHYTQKSLS | |
| | LSPGK | |
| 227 | APELLGGPSVFLFPPKPKDTLMISRTPEVTCVVVDVSHEDPEVKFNWYVDGVE | Clone CH3C.35.20.1 with |
| | VHNAKTKPREEQYNSTYRVVSVLTVLHQDWLNGKEYKCKVSNKALPAPIEKTI | knob mutation |
| | SKAKGQPREPQVYTLPPSRDELTKNQVSLWCLVKGFYPSDIAVEWESFGTEWS | |
| | SYKTTPPVLDSDGSFFLYSKLTVTKEEWQQGFVFSCSVMHEALHNHYTQKSLS | |
| | LSPGK | |
| 228 | APEAAGGPSVFLFPPKPKDTLMISRTPEVTCVVVDVSHEDPEVKFNWYVDGVE | Clone CH3C.35.20.1 with |
| | VHNAKTKPREEQYNSTYRVVSVLTVLHQDWLNGKEYKCKVSNKALPAPIEKTI | knob and LALA mutations |
| | SKAKGQPREPQVYTLPPSRDELTKNQVSLWCLVKGFYPSDIAVEWESFGTEWS | |
| | SYKTTPPVLDSDGSFFLYSKLTVTKEEWQQGFVFSCSVMHEALHNHYTQKSLS | |
| | LSPGK | |
| 229 | APEAAGGPSVFLFPPKPKDTLMISRTPEVTCVVVDVSHEDPEVKFNWYVDGVE | Clone CH3C.35.20.1 with |
| | VHNAKTKPREEQYNSTYRVVSVLTVLHQDWLNGKEYKCKVSNKALGAPIEKTI | knob and LALAPG |
| | SKAKGQPREPQVYTLPPSRDELTKNQVSLWCLVKGFYPSDIAVEWESFGTEWS | mutations |
| | SYKTTPPVLDSDGSFFLYSKLTVTKEEWQQGFVFSCSVMHEALHNHYTQKSLS | |
| | LSPGK | |
| 230 | APELLGGPSVFLFPPKPKDTLYITREPEVTCVVVDVSHEDPEVKFNWYVDGVE | Clone CH3C.35.20.1 with |
| | VHNAKTKPREEQYNSTYRVVSVLTVLHQDWLNGKEYKCKVSNKALPAPIEKTI | knob and YTE mutations |
| | SKAKGQPREPQVYTLPPSRDELTKNQVSLWCLVKGFYPSDIAVEWESFGTEWS | |
| | SYKTTPPVLDSDGSFFLYSKLTVTKEEWQQGFVFSCSVMHEALHNHYTQKSLS | |
| | LSPGK | |
| 231 | APEAAGGPSVFLFPPKPKDTLYITREPEVTCVVVDVSHEDPEVKFNWYVDGVE | Clone CH3C.35.20.1 with |
| | VHNAKTKPREEQYNSTYRVVSVLTVLHQDWLNGKEYKCKVSNKALPAPIEKTI | knob, LALA, and YTE |
| | SKAKGQPREPQVYTLPPSRDELTKNQVSLWCLVKGFYPSDIAVEWESFGTEWS | mutations |
| | SYKTTPPVLDSDGSFFLYSKLTVTKEEWQQGFVFSCSVMHEALHNHYTQKSLS | |
| | LSPGK | |
| 232 | APEAAGGPSVFLFPPKPKDTLYITREPEVTCVVVDVSHEDPEVKFNWYVDGVE | Clone CH3C.35.20.1 with |
| | VHNAKTKPREEQYNSTYRVVSVLTVLHQDWLNGKEYKCKVSNKALGAPIEKTI | knob, LALAPG, and YTE |
| | SKAKGQPREPQVYTLPPSRDELTKNQVSLWCLVKGFYPSDIAVEWESFGTEWS | mutations |
| | SYKTTPPVLDSDGSFFLYSKLTVTKEEWQQGFVFSCSVMHEALHNHYTQKSLS | |
| | LSPGK | |
| 233 | APELLGGPSVFLFPPKPKDTLMISRTPEVTCVVVDVSHEDPEVKFNWYVDGVE | Clone CH3C.35.20.1 with |
| | VHNAKTKPREEQYNSTYRVVSVLTVLHQDWLNGKEYKCKVSNKALPAPIEKTI | hole mutations |
| | SKAKGQPREPQVYTLPPSRDELTKNQVSLSCAVKGFYPSDIAVEWESFGTEWS | |
| | SYKTTPPVLDSDGSFFLVSKLTVTKEEWQQGFVFSCSVMHEALHNHYTQKSLS | |
| | LSPGK | |
| 234 | APEAAGGPSVFLFPPKPKDTLMISRTPEVTCVVVDVSHEDPEVKFNWYVDGVE | Clone CH3C.35.20.1 with |
| | VHNAKTKPREEQYNSTYRVVSVLTVLHQDWLNGKEYKCKVSNKALPAPIEKTI | hole and LALA mutations |
| | SKAKGQPREPQVYTLPPSRDELTKNQVSLSCAVKGFYPSDIAVEWESFGTEWS | |
| | SYKTTPPVLDSDGSFFLVSKLTVTKEEWQQGFVFSCSVMHEALHNHYTQKSLS | |
| | LSPGK | |
| 235 | APEAAGGPSVFLFPPKPKDTLMISRTPEVTCVVVDVSHEDPEVKFNWYVDGVE | Clone CH3C.35.20.1 with |
| | VHNAKTKPREEQYNSTYRVVSVLTVLHQDWLNGKEYKCKVSNKALGAPIEKTI | hole and LALAPG mutations |
| | SKAKGQPREPQVYTLPPSRDELTKNQVSLSCAVKGFYPSDIAVEWESFGTEWS | |
| | SYKTTPPVLDSDGSFFLVSKLTVTKEEWQQGFVFSCSVMHEALHNHYTQKSLS | |
| | LSPGK | |
| 236 | APELLGGPSVFLFPPKPKDTLYITREPEVTCVVVDVSHEDPEVKFNWYVDGVE | Clone CH3C.35.20.1 with |
| | VHNAKTKPREEQYNSTYRVVSVLTVLHQDWLNGKEYKCKVSNKALPAPIEKTI | hole and YTE mutations |
| | SKAKGQPREPQVYTLPPSRDELTKNQVSLSCAVKGFYPSDIAVEWESFGTEWS | |
| | SYKTTPPVLDSDGSFFLVSKLTVTKEEWQQGFVFSCSVMHEALHNHYTQKSLS | |
| | LSPGK | |
| 237 | APEAAGGPSVFLFPPKPKDTLYITREPEVTCVVVDVSHEDPEVKFNWYVDGVE | Clone CH3C.35.20.1 with |
| | VHNAKTKPREEQYNSTYRVVSVLTVLHQDWLNGKEYKCKVSNKALPAPIEKTI | hole, LALA, and Y1E |
| | SKAKGQPREPQVYTLPPSRDELTKNQVSLSCAVKGFYPSDIAVEWESFGTEWS | mutations |
| | SYKTTPPVLDSDGSFFLVSKLTVTKEEWQQGFVFSCSVMHEALHNHYTQKSLS | |
| | LSPGK | |
| 238 | APEAAGGPSVFLFPPKPKDTLYITREPEVTCVVVDVSHEDPEVKFNWYVDGVE | Clone CH3C.35.20.1 with |
| | VHNAKTKPREEQYNSTYRVVSVLTVLHQDWLNGKEYKCKVSNKALGAPIEKTI | hole, LALAPG, and YTE |
| | SKAKGQPREPQVYTLPPSRDELTKNQVSLSCAVKGFYPSDIAVEWESFGTEWS | mutations |
| | SYKTTPPVLDSDGSFFLVSKLTVTKEEWQQGFVFSCSVMHEALHNHYTQKSLS | |
| | LSPGK | |
| 239 | APELLGGPSVFLFPPKPKDTLMISRTPEVTCVVVDVSHEDPEVKFNWYVDGVE | Clone CH3C.35.23.2 with |
| | VHNAKTKPREEQYNSTYRVVSVLTVLHQDWLNGKEYKCKVSNKALPAPIEKTI | knob mutation |
| | SKAKGQPREPQVYTLPPSRDELTKNQVSLWCLVKGFYPSDIAVEWESYGTEWA | |
| | NYKTTPPVLDSDGSFFLYSKLTVTKEEWQQGFVFSCSVMHEALHNHYTQKSLS | |
| | LSPGK | |
| 240 | APEAAGGPSVFLFPPKPKDTLMISRTPEVTCVVVDVSHEDPEVKFNWYVDGVE | Clone CH3C.35.23.2 with |
| | VHNAKTKPREEQYNSTYRVVSVLTVLHQDWLNGKEYKCKVSNKALPAPIEKTI | knob and LALA mutations |
| | SKAKGQPREPQVYTLPPSRDELTKNQVSLWCLVKGFYPSDIAVEWESYGTEWA | |
| | NYKTTPPVLDSDGSFFLYSKLTVTKEEWQQGFVFSCSVMHEALHNHYTQKSLS | |
| | LSPGK | |
| 241 | APEAAGGPSVFLFPPKPKDTLMISRTPEVTCVVVDVSHEDPEVKFNWYVDGVE | Clone CH3C.35.23.2 with |
| | VHNAKTKPREEQYNSTYRVVSVLTVLHQDWLNGKEYKCKVSNKALGAPIEKTI | knob and LALAPG |
| | SKAKGQPREPQVYTLPPSRDELTKNQVSLWCLVKGFYPSDIAVEWESYGTEWA | mutations |
| | NYKTTPPVLDSDGSFFLYSKLTVTKEEWQQGFVFSCSVMHEALHNHYTQKSLS | |
| | LSPGK | |
| 242 | APELLGGPSVFLFPPKPKDTLYITREPEVTCVVVDVSHEDPEVKFNWYVDGVE | Clone CH3C.35.23.2 with |
| | VHNAKTKPREEQYNSTYRVVSVLTVLHQDWLNGKEYKCKVSNKALPAPIEKTI | knob and YTE mutations |
| | SKAKGQPREPQVYTLPPSRDELTKNQVSLWCLVKGFYPSDIAVEWESYGTEWA | |
| | NYKTTPPVLDSDGSFFLYSKLTVTKEEWQQGFVFSCSVMHEALHNHYTQKSLS | |
| | LSPGK | |
| 243 | APEAAGGPSVFLFPPKPKDTLYITREPEVTCVVVDVSHEDPEVKFNWYVDGVE | Clone CH3C.35.23.2 with |
| | VHNAKTKPREEQYNSTYRVVSVLTVLHQDWLNGKEYKCKVSNKALPAPIEKTI | knob, LALA, and YTE |
| | SKAKGQPREPQVYTLPPSRDELTKNQVSLWCLVKGFYPSDIAVEWESYGTEWA | mutations |
| | NYKTTPPVLDSDGSFFLYSKLTVTKEEWQQGFVFSCSVMHEALHNHYTQKSLS | |
| | LSPGK | |
| 244 | APEAAGGPSVFLFPPKPKDTLYITREPEVTCVVVDVSHEDPEVKFNWYVDGVE | Clone CH3C.35.23.2 with |
| | VHNAKTKPREEQYNSTYRVVSVLTVLHQDWLNGKEYKCKVSNKALGAPIEKTI | knob, LALAPG, and YTE |
| | SKAKGQPREPQVYTLPPSRDELTKNQVSLWCLVKGFYPSDIAVEWESYGTEWA | mutations |
| | NYKTTPPVLDSDGSFFLYSKLTVTKEEWQQGFVFSCSVMHEALHNHYTQKSLS | |
| | LSPGK | |
| 245 | APELLGGPSVFLFPPKPKDTLMISRTPEVTCVVVDVSHEDPEVKFNWYVDGVE | Clone CH3C.35.23.2 with |
| | VHNAKTKPREEQYNSTYRVVSVLTVLHQDWLNGKEYKCKVSNKALPAPIEKTI | hole mutations |
| | SKAKGQPREPQVYTLPPSRDELTKNQVSLSCAVKGFYPSDIAVEWESYGTEWA | |
| | NYKTTPPVLDSDGSFFLVSKLTVTKEEWQQGFVFSCSVMHEALHNHYTQKSLS | |
| | LSPGK | |
| 246 | APEAAGGPSVFLFPPKPKDTLMISRTPEVTCVVVDVSHEDPEVKFNWYVDGVE | Clone CH3C.35.23.2 with |
| | VHNAKTKPREEQYNSTYRVVSVLTVLHQDWLNGKEYKCKVSNKALPAPIEKTI | hole and LALA mutations |
| | SKAKGQPREPQVYTLPPSRDELTKNQVSLSCAVKGFYPSDIAVEWESYGTEWA | |
| | NYKTTPPVLDSDGSFFLVSKLTVTKEEWQQGFVFSCSVMHEALHNHYTQKSLS | |
| | LSPGK | |
| 247 | APEAAGGPSVFLFPPKPKDTLMISRTPEVTCVVVDVSHEDPEVKFNWYVDGVE | Clone CH3C.35.23.2 with |
| | VHNAKTKPREEQYNSTYRVVSVLTVLHQDWLNGKEYKCKVSNKALGAPIEKTI | hole and LALAPG mutations |
| | SKAKGQPREPQVYTLPPSRDELTKNQVSLSCAVKGFYPSDIAVEWESYGTEWA | |
| | NYKTTPPVLDSDGSFFLVSKLTVTKEEWQQGFVFSCSVMHEALHNHYTQKSLS | |
| | LSPGK | |
| 248 | APELLGGPSVFLFPPKPKDTLYITREPEVTCVVVDVSHEDPEVKFNWYVDGVE | Clone CH3C.35.23.2 with |
| | VHNAKTKPREEQYNSTYRVVSVLTVLHQDWLNGKEYKCKVSNKALPAPIEKTI | hole and YTE mutations |
| | SKAKGQPREPQVYTLPPSRDELTKNQVSLSCAVKGFYPSDIAVEWESYGTEWA | |
| | NYKTTPPVLDSDGSFFLVSKLTVTKEEWQQGFVFSCSVMHEALHNHYTQKSLS | |
| | LSPGK | |
| 249 | APEAAGGPSVFLFPPKPKDTLYITREPEVTCVVVDVSHEDPEVKFNWYVDGVE | Clone CH3C.35.23.2 with |
| | VHNAKTKPREEQYNSTYRVVSVLTVLHQDWLNGKEYKCKVSNKALPAPIEKTI | hole, LALA, and Y1E |
| | SKAKGQPREPQVYTLPPSRDELTKNQVSLSCAVKGFYPSDIAVEWESYGTEWA | mutations |
| | NYKTTPPVLDSDGSFFLVSKLTVTKEEWQQGFVFSCSVMHEALHNHYTQKSLS | |
| | LSPGK | |
| 250 | APEAAGGPSVFLFPPKPKDTLYITREPEVTCVVVDVSHEDPEVKFNWYVDGVE | Clone CH3C.35.23.2 with |
| | VHNAKTKPREEQYNSTYRVVSVLTVLHQDWLNGKEYKCKVSNKALGAPIEKTI | hole, LALAPG, and YTE |
| | SKAKGQPREPQVYTLPPSRDELTKNQVSLSCAVKGFYPSDIAVEWESYGTEWA | mutations |
| | NYKTTPPVLDSDGSFFLVSKLTVTKEEWQQGFVFSCSVMHEALHNHYTQKSLS | |
| | LSPGK | |
| 251 | APELLGGPSVFLFPPKPKDTLMISRTPEVTCVVVDVSHEDPEVKFNWYVDGVE | Clone CH3C.35.23.3 with |
| | VHNAKTKPREEQYNSTYRVVSVLTVLHQDWLNGKEYKCKVSNKALPAPIEKTI | knob mutation |
| | SKAKGQPREPQVYTLPPSRDELTKNQVSLWCLVKGFYPSDIAVEWESYGTEWV | |
| | NYKTTPPVLDSDGSFFLYSKLTVTKEEWQQGFVFSCSVMHEALHNHYTQKSLS | |
| | LSPGK | |
| 252 | APEAAGGPSVFLFPPKPKDTLMISRTPEVTCVVVDVSHEDPEVKFNWYVDGVE | Clone CH3C.35.23.3 with |
| | VHNAKTKPREEQYNSTYRVVSVLTVLHQDWLNGKEYKCKVSNKALPAPIEKTI | knob and LALA mutations |
| | SKAKGQPREPQVYTLPPSRDELTKNQVSLWCLVKGFYPSDIAVEWESYGTEWV | |
| | NYKTTPPVLDSDGSFFLYSKLTVTKEEWQQGFVFSCSVMHEALHNHYTQKSLS | |
| | LSPGK | |
| 253 | APEAAGGPSVFLFPPKPKDTLMISRTPEVTCVVVDVSHEDPEVKFNWYVDGVE | Clone CH3C.35.23.3 with |
| | VHNAKTKPREEQYNSTYRVVSVLTVLHQDWLNGKEYKCKVSNKALGAPIEKTI | knob and LALAPG |
| | SKAKGQPREPQVYTLPPSRDELTKNQVSLWCLVKGFYPSDIAVEWESYGTEWV | mutations |
| | NYKTTPPVLDSDGSFFLYSKLTVTKEEWQQGFVFSCSVMHEALHNHYTQKSLS | |
| | LSPGK | |
| 254 | APELLGGPSVFLFPPKPKDTLYITREPEVTCVVVDVSHEDPEVKFNWYVDGVE | Clone CH3C.35.23.3 with |
| | VHNAKTKPREEQYNSTYRVVSVLTVLHQDWLNGKEYKCKVSNKALPAPIEKTI | knob and YTE mutations |
| | SKAKGQPREPQVYTLPPSRDELTKNQVSLWCLVKGFYPSDIAVEWESYGTEWV | |
| | NYKTTPPVLDSDGSFFLYSKLTVTKEEWQQGFVFSCSVMHEALHNHYTQKSLS | |
| | LSPGK | |
| 255 | APEAAGGPSVFLFPPKPKDTLYITREPEVTCVVVDVSHEDPEVKFNWYVDGVE | Clone CH3C.35.23.3 with |
| | VHNAKTKPREEQYNSTYRVVSVLTVLHQDWLNGKEYKCKVSNKALPAPIEKTI | knob, LALA, and YTE |
| | SKAKGQPREPQVYTLPPSRDELTKNQVSLWCLVKGFYPSDIAVEWESYGTEWV | mutations |
| | NYKTTPPVLDSDGSFFLYSKLTVTKEEWQQGFVFSCSVMHEALHNHYTQKSLS | |
| | LSPGK | |
| 256 | APEAAGGPSVFLFPPKPKDTLYITREPEVTCVVVDVSHEDPEVKFNWYVDGVE | Clone CH3C.35.23.3 with |
| | VHNAKTKPREEQYNSTYRVVSVLTVLHQDWLNGKEYKCKVSNKALGAPIEKTI | knob, LALAPG, and YTE |
| | SKAKGQPREPQVYTLPPSRDELTKNQVSLWCLVKGFYPSDIAVEWESYGTEWV | mutations |
| | NYKTTPPVLDSDGSFFLYSKLTVTKEEWQQGFVFSCSVMHEALHNHYTQKSLS | |
| | LSPGK | |
| 257 | APELLGGPSVFLFPPKPKDTLMISRTPEVTCVVVDVSHEDPEVKFNWYVDGVE | Clone CH3C.35.23.3 with |
| | VHNAKTKPREEQYNSTYRVVSVLTVLHQDWLNGKEYKCKVSNKALPAPIEKTI | hole mutations |
| | SKAKGQPREPQVYTLPPSRDELTKNQVSLSCAVKGFYPSDIAVEWESYGTEWV | |
| | NYKTTPPVLDSDGSFFLVSKLTVTKEEWQQGFVFSCSVMHEALHNHYTQKSLS | |
| | LSPGK | |
| 258 | APEAAGGPSVFLFPPKPKDTLMISRTPEVTCVVVDVSHEDPEVKFNWYVDGVE | Clone CH3C.35.23.3 with |
| | VHNAKTKPREEQYNSTYRVVSVLTVLHQDWLNGKEYKCKVSNKALPAPIEKTI | hole and LALA mutations |
| | SKAKGQPREPQVYTLPPSRDELTKNQVSLSCAVKGFYPSDIAVEWESYGTEWV | |
| | NYKTTPPVLDSDGSFFLVSKLTVTKEEWQQGFVFSCSVMHEALHNHYTQKSLS | |
| | LSPGK | |
| 259 | APEAAGGPSVFLFPPKPKDTLMISRTPEVTCVVVDVSHEDPEVKFNWYVDGVE | Clone CH3C.35.23.3 with |
| | VHNAKTKPREEQYNSTYRVVSVLTVLHQDWLNGKEYKCKVSNKALGAPIEKTI | hole and LALAPG mutations |
| | SKAKGQPREPQVYTLPPSRDELTKNQVSLSCAVKGFYPSDIAVEWESYGTEWV | |
| | NYKTTPPVLDSDGSFFLVSKLTVTKEEWQQGFVFSCSVMHEALHNHYTQKSLS | |
| | LSPGK | |
| 260 | APELLGGPSVFLFPPKPKDTLYITREPEVTCVVVDVSHEDPEVKFNWYVDGVE | Clone CH3C.35.23.3 with |
| | VHNAKTKPREEQYNSTYRVVSVLTVLHQDWLNGKEYKCKVSNKALPAPIEKTI | hole and YTE mutations |
| | SKAKGQPREPQVYTLPPSRDELTKNQVSLSCAVKGFYPSDIAVEWESYGTEWV | |
| | NYKTTPPVLDSDGSFFLVSKLTVTKEEWQQGFVFSCSVMHEALHNHYTQKSLS | |
| | LSPGK | |
| 261 | APEAAGGPSVFLFPPKPKDTLYITREPEVTCVVVDVSHEDPEVKFNWYVDGVE | Clone CH3C.35.23.3 with |
| | VHNAKTKPREEQYNSTYRVVSVLTVLHQDWLNGKEYKCKVSNKALPAPIEKTI | hole, LALA, and Y1E |
| | SKAKGQPREPQVYTLPPSRDELTKNQVSLSCAVKGFYPSDIAVEWESYGTEWV | mutations |
| | NYKTTPPVLDSDGSFFLVSKLTVTKEEWQQGFVFSCSVMHEALHNHYTQKSLS | |
| | LSPGK | |
| 262 | APEAAGGPSVFLFPPKPKDTLYITREPEVTCVVVDVSHEDPEVKFNWYVDGVE | Clone CH3C.35.23.3 with |
| | VHNAKTKPREEQYNSTYRVVSVLTVLHQDWLNGKEYKCKVSNKALGAPIEKTI | hole, LALAPG, and YTE |
| | SKAKGQPREPQVYTLPPSRDELTKNQVSLSCAVKGFYPSDIAVEWESYGTEWV | mutations |
| | NYKTTPPVLDSDGSFFLVSKLTVTKEEWQQGFVFSCSVMHEALHNHYTQKSLS | |
| | LSPGK | |
| 263 | APELLGGPSVFLFPPKPKDTLMISRTPEVTCVVVDVSHEDPEVKFNWYVDGVE | Clone CH3C.35.23.4 with |
| | VHNAKTKPREEQYNSTYRVVSVLTVLHQDWLNGKEYKCKVSNKALPAPIEKTI | knob mutation |
| | SKAKGQPREPQVYTLPPSRDELTKNQVSLWCLVKGFYPSDIAVEWESYGTEWS | |
| | NYKTTPPVLDSDGSFFLYSKLTVSKEEWQQGFVFSCSVMHEALHNHYTQKSLS | |
| | LSPGK | |
| 264 | APEAAGGPSVFLFPPKPKDTLMISRTPEVTCVVVDVSHEDPEVKFNWYVDGVE | Clone CH3C.35.23.4 with |
| | VHNAKTKPREEQYNSTYRVVSVLTVLHQDWLNGKEYKCKVSNKALPAPIEKTI | knob and LALA mutations |
| | SKAKGQPREPQVYTLPPSRDELTKNQVSLWCLVKGFYPSDIAVEWESYGTEWS | |
| | NYKTTPPVLDSDGSFFLYSKLTVSKEEWQQGFVFSCSVMHEALHNHYTQKSLS | |
| | LSPGK | |
| 265 | APEAAGGPSVFLFPPKPKDTLMISRTPEVTCVVVDVSHEDPEVKFNWYVDGVE | Clone CH3C.35.23.4 with |
| | VHNAKTKPREEQYNSTYRVVSVLTVLHQDWLNGKEYKCKVSNKALGAPIEKTI | knob and LALAPG |
| | SKAKGQPREPQVYTLPPSRDELTKNQVSLWCLVKGFYPSDIAVEWESYGTEWS | mutations |
| | NYKTTPPVLDSDGSFFLYSKLTVSKEEWQQGFVFSCSVMHEALHNHYTQKSLS | |
| | LSPGK | |
| 266 | APELLGGPSVFLFPPKPKDTLYITREPEVTCVVVDVSHEDPEVKFNWYVDGVE | Clone CH3C.35.23.4 with |
| | VHNAKTKPREEQYNSTYRVVSVLTVLHQDWLNGKEYKCKVSNKALPAPIEKTI | knob and YTE mutations |
| | SKAKGQPREPQVYTLPPSRDELTKNQVSLWCLVKGFYPSDIAVEWESYGTEWS | |
| | NYKTTPPVLDSDGSFFLYSKLTVSKEEWQQGFVFSCSVMHEALHNHYTQKSLS | |
| | LSPGK | |
| 267 | APEAAGGPSVFLFPPKPKDTLYITREPEVTCVVVDVSHEDPEVKFNWYVDGVE | Clone CH3C.35.23.4 with |
| | VHNAKTKPREEQYNSTYRVVSVLTVLHQDWLNGKEYKCKVSNKALPAPIEKTI | knob, LALA, and YTE |
| | SKAKGQPREPQVYTLPPSRDELTKNQVSLWCLVKGFYPSDIAVEWESYGTEWS | mutations |
| | NYKTTPPVLDSDGSFFLYSKLTVSKEEWQQGFVFSCSVMHEALHNHYTQKSLS | |
| | LSPGK | |
| 268 | APEAAGGPSVFLFPPKPKDTLYITREPEVTCVVVDVSHEDPEVKFNWYVDGVE | Clone CH3C.35.23.4 with |
| | VHNAKTKPREEQYNSTYRVVSVLTVLHQDWLNGKEYKCKVSNKALGAPIEKTI | knob, LALAPG, and YTE |
| | SKAKGQPREPQVYTLPPSRDELTKNQVSLWCLVKGFYPSDIAVEWESYGTEWS | mutations |
| | NYKTTPPVLDSDGSFFLYSKLTVSKEEWQQGFVFSCSVMHEALHNHYTQKSLS | |
| | LSPGK | |
| 269 | APELLGGPSVFLFPPKPKDTLMISRTPEVTCVVVDVSHEDPEVKFNWYVDGVE | Clone CH3C.35.23.4 with |
| | VHNAKTKPREEQYNSTYRVVSVLTVLHQDWLNGKEYKCKVSNKALPAPIEKTI | hole mutations |
| | SKAKGQPREPQVYTLPPSRDELTKNQVSLSCAVKGFYPSDIAVEWESYGTEWS | |
| | NYKTTPPVLDSDGSFFLVSKLTVSKEEWQQGFVFSCSVMHEALHNHYTQKSLS | |
| | LSPGK | |
| 270 | APEAAGGPSVFLFPPKPKDTLMISRTPEVTCVVVDVSHEDPEVKFNWYVDGVE | Clone CH3C.35.23.4 with |
| | VHNAKTKPREEQYNSTYRVVSVLTVLHQDWLNGKEYKCKVSNKALPAPIEKTI | hole and LALA mutations |
| | SKAKGQPREPQVYTLPPSRDELTKNQVSLSCAVKGFYPSDIAVEWESYGTEWS | |
| | NYKTTPPVLDSDGSFFLVSKLTVSKEEWQQGFVFSCSVMHEALHNHYTQKSLS | |
| | LSPGK | |
| 271 | APEAAGGPSVFLFPPKPKDTLMISRTPEVTCVVVDVSHEDPEVKFNWYVDGVE | Clone CH3C.35.23.4 with |
| | VHNAKTKPREEQYNSTYRVVSVLTVLHQDWLNGKEYKCKVSNKALGAPIEKTI | hole and LALAPG mutations |
| | SKAKGQPREPQVYTLPPSRDELTKNQVSLSCAVKGFYPSDIAVEWESYGILWS | |
| | NYKTTPPVLDSDGSFFLVSKLTVSKEEWQQGFVFSCSVMHEALHNHYTQKSLS | |
| | LSPGK | |
| 272 | APELLGGPSVFLFPPKPKDTLYITREPEVTCVVVDVSHEDPEVKFNWYVDGVE | Clone CH3C.35.23.4 with |
| | VHNAKTKPREEQYNSTYRVVSVLTVLHQDWLNGKEYKCKVSNKALPAPIEKTI | hole and YTE mutations |
| | SKAKGQPREPQVYTLPPSRDELTKNQVSLSCAVKGFYPSDIAVEWESYGTEWS | |
| | NYKTTPPVLDSDGSFFLVSKLTVSKEEWQQGFVFSCSVMHEALHNHYTQKSLS | |
| | LSPGK | |
| 273 | APEAAGGPSVFLFPPKPKDTLYITREPEVTCVVVDVSHEDPEVKFNWYVDGVE | Clone CH3C.35.23.4 with |
| | VHNAKTKPREEQYNSTYRVVSVLTVLHQDWLNGKEYKCKVSNKALPAPIEKTI | hole, LALA, and Y1E |
| | SKAKGQPREPQVYTLPPSRDELTKNQVSLSCAVKGFYPSDIAVEWESYGTEWS | mutations |
| | NYKTTPPVLDSDGSFFLVSKLTVSKEEWQQGFVFSCSVMHEALHNHYTQKSLS | |
| | LSPGK | |
| 274 | APEAAGGPSVFLFPPKPKDTLYITREPEVTCVVVDVSHEDPEVKFNWYVDGVE | Clone CH3C.35.23.4 with |
| | VHNAKTKPREEQYNSTYRVVSVLTVLHQDWLNGKEYKCKVSNKALGAPIEKTI | hole, LALAPG, and YTE |
| | SKAKGQPREPQVYTLPPSRDELTKNQVSLSCAVKGFYPSDIAVEWESYGTEWS | mutations |
| | NYKTTPPVLDSDGSFFLVSKLTVSKEEWQQGFVFSCSVMHEALHNHYTQKSLS | |
| | LSPGK | |
| 275 | APELLGGPSVFLFPPKPKDTLMISRTPEVTCVVVDVSHEDPEVKFNWYVDGVE | Clone CH3C.35.21.17.2 with |
| | VHNAKTKPREEQYNSTYRVVSVLTVLHQDWLNGKEYKCKVSNKALPAPIEKTI | knob mutation |
| | SKAKGQPREPQVYTLPPSRDELTKNQVSLWCLVKGFYPSDIAVLWESYGTEWA | |
| | SYKTTPPVLDSDGSFFLYSKLTVTKEEWQQGFVFSCSVMHEALHNHYTQKSLS | |
| | LSPGK | |
| 276 | APEAAGGPSVFLFPPKPKDTLMISRTPEVTCVVVDVSHEDPEVKFNWYVDGVE | Clone CH3C.35.21.17.2 with |
| | VHNAKTKPREEQYNSTYRVVSVLTVLHQDWLNGKEYKCKVSNKALPAPIEKTI | knob and LALA mutations |
| | SKAKGQPREPQVYTLPPSRDELTKNQVSLWCLVKGFYPSDIAVLWESYGTEWA | |
| | SYKTTPPVLDSDGSFFLYSKLTVTKEEWQQGFVFSCSVMHEALHNHYTQKSLS | |
| | LSPGK | |
| 277 | APEAAGGPSVFLFPPKPKDTLMISRTPEVTCVVVDVSHEDPEVKFNWYVDGVE | Clone CH3C.35.21.17.2 with |
| | VHNAKTKPREEQYNSTYRVVSVLTVLHQDWLNGKEYKCKVSNKALGAPIEKTI | knob and LALAPG |
| | SKAKGQPREPQVYTLPPSRDELTKNQVSLWCLVKGFYPSDIAVLWESYGTEWA | mutations |
| | SYKTTPPVLDSDGSFFLYSKLTVTKEEWQQGFVFSCSVMHEALHNHYTQKSLS | |
| | LSPGK | |
| 278 | APELLGGPSVFLFPPKPKDTLYITREPEVTCVVVDVSHEDPEVKFNWYVDGVE | Clone CH3C.35.21.17.2 with |
| | VHNAKTKPREEQYNSTYRVVSVLTVLHQDWLNGKEYKCKVSNKALPAPIEKTI | knob and YTE mutations |
| | SKAKGQPREPQVYTLPPSRDELTKNQVSLWCLVKGFYPSDIAVLWESYGTEWA | |
| | SYKTTPPVLDSDGSFFLYSKLTVTKEEWQQGFVFSCSVMHEALHNHYTQKSLS | |
| | LSPGK | |
| 279 | APEAAGGPSVFLFPPKPKDTLYITREPEVTCVVVDVSHEDPEVKFNWYVDGVE | Clone CH3C.35.21.17.2 with |
| | VHNAKTKPREEQYNSTYRVVSVLTVLHQDWLNGKEYKCKVSNKALPAPIEKTI | knob, LALA, and YTE |
| | SKAKGQPREPQVYTLPPSRDELTKNQVSLWCLVKGFYPSDIAVLWESYGTEWA | mutations |
| | SYKTTPPVLDSDGSFFLYSKLTVTKEEWQQGFVFSCSVMHEALHNHYTQKSLS | |
| | LSPGK | |
| 280 | APEAAGGPSVFLFPPKPKDTLYITREPEVTCVVVDVSHEDPEVKFNWYVDGVE | Clone CH3C.35.21.17.2 with |
| | VHNAKTKPREEQYNSTYRVVSVLTVLHQDWLNGKEYKCKVSNKALGAPIEKTI | knob, LALAPG, and YTE |
| | SKAKGQPREPQVYTLPPSRDELTKNQVSLWCLVKGFYPSDIAVLWESYGTEWA | mutations |
| | SYKTTPPVLDSDGSFFLYSKLTVTKEEWQQGFVFSCSVMHEALHNHYTQKSLS | |
| | LSPGK | |
| 281 | APELLGGPSVFLFPPKPKDTLMISRTPEVTCVVVDVSHEDPEVKFNWYVDGVE | Clone CH3C.35.21.17.2 with |
| | VHNAKTKPREEQYNSTYRVVSVLTVLHQDWLNGKEYKCKVSNKALPAPIEKTI | hole mutations |
| | SKAKGQPREPQVYTLPPSRDELTKNQVSLSCAVKGFYPSDIAVLWESYGTEWA | |
| | SYKTTPPVLDSDGSFFLVSKLTVTKEEWQQGFVFSCSVMHEALHNHYTQKSLS | |
| | LSPGK | |
| 282 | APEAAGGPSVFLFPPKPKDTLMISRTPEVTCVVVDVSHEDPEVKFNWYVDGVE | Clone CH3C.35.21.17.2 with |
| | VHNAKTKPREEQYNSTYRVVSVLTVLHQDWLNGKEYKCKVSNKALPAPIEKTI | hole and LALA mutations |
| | SKAKGQPREPQVYTLPPSRDELTKNQVSLSCAVKGFYPSDIAVLWESYGTEWA | |
| | SYKTTPPVLDSDGSFFLVSKLTVTKEEWQQGFVFSCSVMHEALHNHYTQKSLS | |
| | LSPGK | |
| 283 | APEAAGGPSVFLFPPKPKDTLMISRTPEVTCVVVDVSHEDPEVKFNWYVDGVE | Clone CH3C.35.21.17.2 with |
| | VHNAKTKPREEQYNSTYRVVSVLTVLHQDWLNGKEYKCKVSNKALGAPIEKTI | hole and LALAPG mutations |
| | SKAKGQPREPQVYTLPPSRDELTKNQVSLSCAVKGFYPSDIAVLWESYGTEWA | |
| | SYKTTPPVLDSDGSFFLVSKLTVTKEEWQQGFVFSCSVMHEALHNHYTQKSLS | |
| | LSPGK | |
| 284 | APELLGGPSVFLFPPKPKDTLYITREPEVTCVVVDVSHEDPEVKFNWYVDGVE | Clone CH3C.35.21.17.2 with |
| | VHNAKTKPREEQYNSTYRVVSVLTVLHQDWLNGKEYKCKVSNKALPAPIEKTI | hole and YTE mutations |
| | SKAKGQPREPQVYTLPPSRDELTKNQVSLSCAVKGFYPSDIAVLWESYGTEWA | |
| | SYKTTPPVLDSDGSFFLVSKLTVTKEEWQQGFVFSCSVMHEALHNHYTQKSLS | |
| | LSPGK | |
| 285 | APEAAGGPSVFLFPPKPKDTLYITREPEVTCVVVDVSHEDPEVKFNWYVDGVE | Clone CH3C.35.21.17.2 with |
| | VHNAKTKPREEQYNSTYRVVSVLTVLHQDWLNGKEYKCKVSNKALPAPIEKTI | hole, LALA, and Y1E |
| | SKAKGQPREPQVYTLPPSRDELTKNQVSLSCAVKGFYPSDIAVLWESYGTEWA | mutations |
| | SYKTTPPVLDSDGSFFLVSKLTVTKEEWQQGFVFSCSVMHEALHNHYTQKSLS | |
| | LSPGK | |
| 286 | APEAAGGPSVFLFPPKPKDTLYITREPEVTCVVVDVSHEDPEVKFNWYVDGVE | Clone CH3C.35.21.17.2 with |
| | VHNAKTKPREEQYNSTYRVVSVLTVLHQDWLNGKEYKCKVSNKALGAPIEKTI | hole, LALAPG, and YTE |
| | SKAKGQPREPQVYTLPPSRDELTKNQVSLSCAVKGFYPSDIAVLWESYGTEWA | mutations |
| | SYKTTPPVLDSDGSFFLVSKLTVTKEEWQQGFVFSCSVMHEALHNHYTQKSLS | |
| | LSPGK | |
| 287 | APELLGGPSVFLFPPKPKDTLMISRTPEVTCVVVDVSHEDPEVKFNWYVDGVE | Clone CH3C.35.23 with knob |
| | VHNAKTKPREEQYNSTYRVVSVLTVLHQDWLNGKEYKCKVSNKALPAPIEKTI | mutation |
| | SKAKGQPREPQVYTLPPSRDELTKNQVSLWCLVKGFYPSDIAVEWESYGTEWS | |
| | NYKTTPPVLDSDGSFFLYSKLTVTKEEWQQGFVFSCSVMHEALHNHYTQKSLS | |
| | LSPGK | |
| 288 | APEAAGGPSVFLFPPKPKDTLMISRTPEVTCVVVDVSHEDPEVKFNWYVDGVE | Clone CH3C.35.23 with knob |
| | VHNAKTKPREEQYNSTYRVVSVLTVLHQDWLNGKEYKCKVSNKALPAPIEKTI | and LALA mutations |
| | SKAKGQPREPQVYTLPPSRDELTKNQVSLWCLVKGFYPSDIAVEWESYGTEWS | |
| | NYKTTPPVLDSDGSFFLYSKLTVTKEEWQQGFVFSCSVMHEALHNHYTQKSLS | |
| | LSPGK | |
| 289 | APEAAGGPSVFLFPPKPKDTLMISRTPEVTCVVVDVSHEDPEVKFNWYVDGVE | Clone CH3C.35.23 with knob |
| | VHNAKTKPREEQYNSTYRVVSVLTVLHQDWLNGKEYKCKVSNKALGAPIEKTI | and LALAPG mutations |
| | SKAKGQPREPQVYTLPPSRDELTKNQVSLWCLVKGFYPSDIAVEWESYGTEWS | |
| | NYKTTPPVLDSDGSFFLYSKLTVTKEEWQQGFVFSCSVMHEALHNHYTQKSLS | |
| | LSPGK | |
| 290 | APELLGGPSVFLFPPKPKDTLYITREPEVTCVVVDVSHEDPEVKFNWYVDGVE | Clone CH3C.35.23 with knob |
| | VHNAKTKPREEQYNSTYRVVSVLTVLHQDWLNGKEYKCKVSNKALPAPIEKTI | and YTE mutations |
| | SKAKGQPREPQVYTLPPSRDELTKNQVSLWCLVKGFYPSDIAVEWESYGTEWS | |
| | NYKTTPPVLDSDGSFFLYSKLTVTKEEWQQGFVFSCSVMHEALHNHYTQKSLS | |
| | LSPGK | |
| 291 | APEAAGGPSVFLFPPKPKDTLYITREPEVTCVVVDVSHEDPEVKFNWYVDGVE | Clone CH3C.35.23 with |
| | VHNAKTKPREEQYNSTYRVVSVLTVLHQDWLNGKEYKCKVSNKALPAPIEKTI | knob, LALA, and YTE |
| | SKAKGQPREPQVYTLPPSRDELTKNQVSLWCLVKGFYPSDIAVEWESYGTEWS | mutations |
| | NYKTTPPVLDSDGSFFLYSKLTVTKEEWQQGFVFSCSVMHEALHNHYTQKSLS | |
| | LSPGK | |
| 292 | APEAAGGPSVFLFPPKPKDTLYITREPEVTCVVVDVSHEDPEVKFNWYVDGVE | Clone CH3C.35.23 with |
| | VHNAKTKPREEQYNSTYRVVSVLTVLHQDWLNGKEYKCKVSNKALGAPIEKTI | knob, LALAPG, and Y1E |
| | SKAKGQPREPQVYTLPPSRDELTKNQVSLWCLVKGFYPSDIAVEWESYGTEWS | mutations |
| | NYKTTPPVLDSDGSFFLYSKLTVTKEEWQQGFVFSCSVMHEALHNHYTQKSLS | |
| | LSPGK | |
| 293 | APELLGGPSVFLFPPKPKDTLMISRTPEVTCVVVDVSHEDPEVKFNWYVDGVE | Clone CH3C.35.23 with hole |
| | VHNAKTKPREEQYNSTYRVVSVLTVLHQDWLNGKEYKCKVSNKALPAPIEKTI | mutations |
| | SKAKGQPREPQVYTLPPSRDELTKNQVSLSCAVKGFYPSDIAVEWESYGTEWS | |
| | NYKTTPPVLDSDGSFFLVSKLTVTKEEWQQGFVFSCSVMHEALHNHYTQKSLS | |
| | LSPGK | |
| 294 | APEAAGGPSVFLFPPKPKDTLMISRTPEVTCVVVDVSHEDPEVKFNWYVDGVE | Clone CH3C.35.23 with hole |
| | VHNAKTKPREEQYNSTYRVVSVLTVLHQDWLNGKEYKCKVSNKALPAPIEKTI | and LALA mutations |
| | SKAKGQPREPQVYTLPPSRDELTKNQVSLSCAVKGFYPSDIAVEWESYGTEWS | |
| | NYKTTPPVLDSDGSFFLVSKLTVTKEEWQQGFVFSCSVMHEALHNHYTQKSLS | |
| | LSPGK | |
| 295 | APEAAGGPSVFLFPPKPKDTLMISRTPEVTCVVVDVSHEDPEVKFNWYVDGVE | Clone CH3C.35.23 with hole |
| | VHNAKTKPREEQYNSTYRVVSVLTVLHQDWLNGKEYKCKVSNKALGAPIEKTI | and LALAPG mutations |
| | SKAKGQPREPQVYTLPPSRDELTKNQVSLSCAVKGFYPSDIAVEWESYGTEWS | |
| | NYKTTPPVLDSDGSFFLVSKLTVTKEEWQQGFVFSCSVMHEALHNHYTQKSLS | |
| | LSPGK | |
| 296 | APELLGGPSVFLFPPKPKDTLYITREPEVTCVVVDVSHEDPEVKFNWYVDGVE | Clone CH3C.35.23 with hole |
| | VHNAKTKPREEQYNSTYRVVSVLTVLHQDWLNGKEYKCKVSNKALPAPIEKTI | and YTE mutations |
| | SKAKGQPREPQVYTLPPSRDELTKNQVSLSCAVKGFYPSDIAVEWESYGTEWS | |
| | NYKTTPPVLDSDGSFFLVSKLTVTKEEWQQGFVFSCSVMHEALHNHYTQKSLS | |
| | LSPGK | |
| 297 | APEAAGGPSVFLFPPKPKDTLYITREPEVTCVVVDVSHEDPEVKFNWYVDGVE | Clone CH3C.35.23 with hole, |
| | VHNAKTKPREEQYNSTYRVVSVLTVLHQDWLNGKEYKCKVSNKALPAPIEKTI | LALA, and YTE mutations |
| | SKAKGQPREPQVYTLPPSRDELTKNQVSLSCAVKGFYPSDIAVEWESYGTEWS | |
| | NYKTTPPVLDSDGSFFLVSKLTVTKEEWQQGFVFSCSVMHEALHNHYTQKSLS | |
| | LSPGK | |
| 298 | APEAAGGPSVFLFPPKPKDTLYITREPEVTCVVVDVSHEDPEVKFNWYVDGVE | Clone CH3C.35.23 with hole, |
| | VHNAKTKPREEQYNSTYRVVSVLTVLHQDWLNGKEYKCKVSNKALGAPIEKTI | LALAPG, and YTE |
| | SKAKGQPREPQVYTLPPSRDELTKNQVSLSCAVKGFYPSDIAVEWESYGTEWS | mutations |
| | NYKTTPPVLDSDGSFFLVSKLTVTKEEWQQGFVFSCSVMHEALHNHYTQKSLS | |
| | LSPGK | |
| 299 | YxTEWSS | CH3C motif |
| 300 | TxxExxxxF | CH3C motif |
| 301 | GGACAGGGATCCAGAGTTCC | muIgG1 3′ VH PCR primer |
| 302 | AGCTGGGAAGGTGTGCACAC | muIgG2 3′ VH PCR primer |
| 303 | CAGGGGCCAGTGGATAGAC | muIgG3 3′ VH PCR primer |
| 304 | GACATTGATGTCTTTGGGGT | muCkappa.1 3′ VL PCR |
| | | primer |
| 305 | TTCACTGCCATCAATCTTCC | muCkappa.2 3′ VL PCR |
| | | primer |
| 306 | EVQLQQSGPELVKPGASVKMSCKASGYTFTDYNMHWVKQSHGKSLEWIGYINP | 7B10.A2 VH amino acid |
| | NNGGTTYNQKFKGKATLTVNKSSSTAYMELRSLTSEDSAVYYCATYNNHYFDS | sequence |
| | WGQGTTLTVSS | |
| 307 | GYTFTDYNMH | 7B10.A2 CDR-H1 |
| 308 | YINPNNGGTTYNQKFKG | 7B10.A2 CDR-H2 |
| 309 | ATYNNHYFDS | 7B10.A2 CDR-H3 |
| 310 | DIQMTQTTSSLSASLGDRVTISCSASQGISNYLNWYQQKPDGTVKLLIYYTSN | 7B10.A2 VL amino acid |
| | LHSGVPSRFSGSGSGTDYSLTISNLEPEDIATYYCQQYSNLPYTFGGGTKLEI | sequence |
| | K | |
| 311 | SASQGISNYLN | 7B10.A2 CDR-L1 |
| 312 | YTSNLHS | 7B10.A2 CDR-L2 |
| 313 | QQYSNLPYT | 7B10.A2 CDR-L3 |
| 314 | QVHLQQSGPEVVRPGVSVKISCKGSGYTFTDYGMHWVKQSHAKSLEWIGVIST | 51D4 VH amino acid |
| | YNGNTSYNQKYKGKATVTVDKPSSTAYMELVRLTSEDSAIYYCARDFGYVPFD | sequence |
| | YWGQGTTLTVSS | |
| 315 | GYTFTDYGMH | 51D4 CDR-H1 |
| 316 | VISTYNGNTSYNQKYKG | 51D4 CDR-H2 |
| 317 | ARDFGYVPFDY | 51D4 CDR-H3 |
| 318 | DVVMTQTPLTLSVTIGQPASISCKSSQSLLDSDGKTYLNWLLQRPGQSPKRLI | 51D4 VL amino acid |
| | YLVSYLDSGVPDRFTGSGSGTDFTLKISRVEADDLGVYYCWQGTHFPYTFGGG | sequence |
| | TKLEIK | |
| 319 | LVSYLDS | 51D4 CDR-L2 |
| 320 | GX₂X₃X₄X₅X₆X₇X₈X₉X₁₀X₁₁, wherein X₂ is Y or F; X₃ is T, N, | CDR-H1 consensus sequence |
| | or S; X₄ is F, L, or I; X₅ is T, S, or K; X₆ is D, S, | |
| | or E; X₇ is D or absent; X₈ is H, Y, or T; X₉ is A, N, | |
| | G, V, W, T, or Y; X₁₀ is M, I, or W; andX₁₁ is H, Q, | |
| | or N | |
| 321 | GYX₃X₄X₅X₆X₇X₈X₉X₁₀X₁₁, wherein X₃ is T or S; X₄ is F, L, | CDR-H1 consensus sequence |
| | or I; X₅ is T or S; X₆ is D, S, or E; X₇ is D or | |
| | absent; X₈ is H or Y; X₉ is A, N, G, V, W, T, or A; | |
| | X₁₀ is M, I, or W; and X₁₁ is H, Q, or N | |
| 322 | GX₂X₃X₄X₅X₆X₈X₉X₁₀X₁₁, wherein X₂ is Y or F; X₃ is T or N; | CDR-H1 consensus sequence |
| | X₄ is F, L, or I; X₅ is T, S, or K; X₆ is D, S, or E; | |
| | X₈ is H, Y, or T; X₉ is A, N, G, V, W, T, Y, or A;; | |
| | X₁₀ is M or I; and X₁₁ is H or Q | |
| 323 | GYX₄X₅X₆X₈X₉X₁₀X₁₁, wherein X₄ is F or L; X₅ is T or S; | CDR-H1 consensus sequence |
| | X₆ is D, S, or E; X₈ is H, Y; X₉ is A, N, G, V, W, T,; | |
| | X₁₀ is M or I; and X₁₁ is H or Q | |
| 324 | X₁X₂X₃X₄X₅X₆X₇X₈X₉X₁₀YX₁₂X₁₃X₁₄X₁₅X₁₆X₁₇, wherein X₁ is D, V, | CDR-H2 consensus sequence |
| | Y, R, G, or T; X₂ is I, S, or V; X₃ is L, S, N, D, I, | |
| | or Y; X₄ is P, T, or absent; X₅ is S, Y, N, T, A, G, | |
| | or F; X₆ is I, S, N, T, or D; X₇ is G or D; X₈ is G, | |
| | D, N, R, or S; X₉ is R, T, or A; X₁₀ is I, G, S, K, T, | |
| | N, or R; X₁₂ is G, N, D, or T; X₁₃ is V, Q, E, or P; | |
| | X₁₄ is K or S; X₁₅ is F, Y, or L; X₁₆ is K, R, Q, or | |
| | is absent; and X₁₇ is G, T, D, S, or is absent | |
| 325 | X₁X₂X₃X₄X₅X₆X₇X₈X₉X₁₀YX₁₂X₁₃X₁₄X₁₅X₁₆X₁₇, wherein X₁ is V, Y, | CDR-H2 consensus sequence |
| | R, G, or T; X₂ is I, S, or V; X₃ is S, N, D, I, or Y; | |
| | X₄ is P, T, or absent; X₅ is Y, N, T, A, G, or F; X₆ | |
| | is S, N, T, or D; X₇ is G or D; X₈ is G, D, N, R, or | |
| | s; X₉ is T, or A; X₁₀ is I, G, S, K, T, N, or R; X₁₂ | |
| | is N, D, or T; X₁₃ is Q, E, or P; X₁₄ is K or S; X₁₅ | |
| | is F, Y or L; X₁₆ is K, R, or Q; and X₁₇ is G, T, D, | |
| | or S | |
| 326 | X₁X₂X₃X₄X₅X₆X₇X₈X₉X₁₀YX₁₂X₁₃KX₁₅X₁₆X₁₇, wherein X₁ is V, Y, | CDR-H2 consensus sequence |
| | R, G, or T; X₂ is I, S, or V; X₃ is S, N, D, I, or Y; | |
| | X₄ is P or T; X₅ is Y, N, T, A, or G; X₆ is S, N, T, | |
| | or D; X₇ is G or D; X₈ is G, D, or N; X₉ is T, or A; | |
| | X₁₀ is G, S, K, T, N, or R; X₁₂ is N, D, or T; X₁₃ is | |
| | Q, E, or P; X₁₅ is F or Y; X₁₆ is K, R, or Q; and X₁₇ | |
| | is G, T, or D | |
| 327 | ARX₃X₄X₅X₆X₇X₈X₉X₁₀YAX₁₃DY, wherein X₃ is G or N; X₄ is | CDR-H3 consensus sequence |
| | D or G; X₅ is D or I; X₆ is S or T; X₇ is Y or T; X₈ | |
| | is R or A; X₉ is R or G; X₁₀ is G or Y; and X₁₃ is L | |
| | or M | |
| 328 | X₁SSX₄SLX₇X₈X₉X₁₀X₁₁X₁₂X₁₃X₁₄X₁₅LX₁₇, wherein X₁ is R or K; | CDR-L1 consensus sequence |
| | X₄ is Q or K; X₇ is V or L; X₈ is H, D, or Y; X₉ is | |
| | I, N, or S; X₁₀ is S or absent; X₁₁ is D or N; X₁₂ is | |
| | G or Q; X₁₃ is N, I, or K; X₁₄ is T or S; X₁₅ is Y or | |
| | F; and X₁₇ is Q, H, Y, N, or A | |
| 329 | X₁ASX₄X₅IX₇X₈X₉LX₁₁, wherein X₁ is R, K, or S; X₄ is E | CDR-L1 consensus sequence |
| | or Q; X₅ is N, D, or G; X₇ is Y or S; X₈ is S or N; | |
| | X₉ is N, R, or Y; and X₁₁ is A or N | |
| 330 | X₁X₂SX₄X₅X₆S, wherein X₁ is K, Q, Y, V, or L; X₂ is V, | CDR-L2 consensus sequence |
| | M, or T; X₄ is N, K, or Y; X₅ is R or L; and X₆ is F, | |
| | A, H, or D | |
| 331 | X₁X₂X₃X₄X₅X₆X₇X₈T, wherein X₁ is S, W, or Q; X₂ is Q or | CDR-L3 consensus sequence |
| | H; X₃ is S, T, G, Y, or F; X₄ is T, F, W, S; X₅ is H, | |
| | S, G, or N; X₆ is V, A, F, Y, T, or L; and X₈ is Y, | |
| | F, P, or W | |
| 332 | QX₂X₃X₄X₅X₆PX₈T, wherein X₂ is Q or H; X₃ is Y or F; X₄ | CDR-L3 consensus sequence |
| | is F, W, or S; X₅ is S, G, or N; X₆ is Y, T, or L; | |
| | and X₈ is P, Y, or W | |
| 333 | SGAHNTTVFQGVAGQSLQVSCPYDSMKHWGRRKAWCRQLGEKGPCQRVVSTHN | Human TREM2 extracellular |
| | LWLLSFLRRWNGSTAITDDTLGGTLTITLRNLQPHDAGLYQCQSLHGSEADTL | domain (ECD) amino acid |
| | RKVLVEVLADPLDHRDAGDLWFPGESESFEDAHVEHSISRSLLEGEIPFPPTS | sequence (without signal |
| | | peptide and His tag) |
| 334 | DLWFPGESES | Human TREM2 peptide |
| 335 | DLWFPGESE | Human TREM2 peptide 9- |
| | | mer amino acid sequence |
| 336 | DLWFP | Human TREM2 peptide |
| | | sequence (residues 140-144 |
| | | of full-length TREM2) |
| 337 | APELLGGPSVFLFPPKPKDTLMISRTPEVTCVVVDVSHEDPEVKFNWYVDGVE | Clone CH3C.18.3.4-1 |
| | VHNAKTKPREEQYNSTYRVVSVLTVLHQDWLNGKEYKCKVSNKALPAPIEKTI | (CH3C.3.4-1) |
| | SKAKGQPREPQVYTLPPSRDELTKNQVSLTCLVKGFYPSDIAVEWESWGFVWS | |
| | TYKTTPPVLDSDGSFFLYSKLTVPKSNWQQGFVFSCSVMHEALHNHYTQKSLS | |
| | LSPGK | |
| 338 | APELLGGPSVFLFPPKPKDTLMISRTPEVTCVVVDVSHEDPEVKFNWYVDGVE | Clone CH3C.18.3.4-19 |
| | VHNAKTKPREEQYNSTYRVVSVLTVLHQDWLNGKEYKCKVSNKALPAPIEKTI | (CH3C.3.4-19) |
| | SKAKGQPREPQVYTLPPSRDELTKNQVSLTCLVKGFYPSDIAVEWESWGHVWS | |
| | TYKTTPPVLDSDGSFFLYSKLTVPKSNWQQGYVFSCSVMHEALHNHYTQKSLS | |
| | LSPGK | |
| 339 | APELLGGPSVFLFPPKPKDTLMISRTPEVTCVVVDVSHEDPEVKFNWYVDGVE | Clone CH3C.18.3.2-3 |
| | VHNAKTKPREEQYNSTYRVVSVLTVLHQDWLNGKEYKCKVSNKALPAPIEKTI | (CH3C.3.2-3) |
| | SKAKGQPREPQVYTLPPSRDELTKNQVSLTCLVKGFYPSDIAVEWESLGHVWV | |
| | EQKTTPPVLDSDGSFFLYSKLTVPKSTWQQGWVFSCSVMHEALHNHYTQKSLS | |
| | LSPGK | |
| 340 | APELLGGPSVFLFPPKPKDTLMISRTPEVTCVVVDVSHEDPEVKFNWYVDGVE | Clone CH3C.18.3.2-14 |
| | VHNAKTKPREEQYNSTYRVVSVLTVLHQDWLNGKEYKCKVSNKALPAPIEKTI | (CH3C.3.2-14) |
| | SKAKGQPREPQVYTLPPSRDELTKNQVSLTCLVKGFYPSDIAVEWESLGHVWV | |
| | GVKTTPPVLDSDGSFFLYSKLTVPKSTWQQGWVFSCSVMHEALHNHYTQKSLS | |
| | LSPGK | |
| 341 | APELLGGPSVFLFPPKPKDTLMISRTPEVTCVVVDVSHEDPEVKFNWYVDGVE | Clone CH3C.18.3.2-24 |
| | VHNAKTKPREEQYNSTYRVVSVLTVLHQDWLNGKEYKCKVSNKALPAPIEKTI | (CH3C.3.2-24) |
| | SKAKGQPREPQVYTLPPSRDELTKNQVSLTCLVKGFYPSDIAVEWESLGHVWV | |
| | HTKTTPPVLDSDGSFFLYSKLTVPKSTWQQGWVFSCSVMHEALHNHYTQKSLS | |
| | LSPGK | |
| 342 | APELLGGPSVFLFPPKPKDTLMISRTPEVTCVVVDVSHEDPEVKFNWYVDGVE | Clone CH3C.18.3.4-26 |
| | VHNAKTKPREEQYNSTYRVVSVLTVLHQDWLNGKEYKCKVSNKALPAPIEKTI | (CH3C.3.4-26) |
| | SKAKGQPREPQVYTLPPSRDELTKNQVSLTCLVKGFYPSDIAVEWESWGTVWG | |
| | TYKTTPPVLDSDGSFFLYSKLTVPKSNWQQGYVFSCSVMHEALHNHYTQKSLS | |
| | LSPGK | |
| 343 | APELLGGPSVFLFPPKPKDTLMISRTPEVTCVVVDVSHEDPEVKFNWYVDGVE | Clone CH3C.18.3.2-27 |
| | VHNAKTKPREEQYNSTYRVVSVLTVLHQDWLNGKEYKCKVSNKALPAPIEKTI | (CH3C.3.2-27) |
| | SKAKGQPREPQVYTLPPSRDELTKNQVSLTCLVKGFYPSDIAVEWESLGHVWV | |
| | GTKTTPPVLDSDGSFFLYSKLTVPKSTWQQGWVFSCSVMHEALHNHYTQKSLS | |
| | LSPGK | |
| 344 | APELLGGPSVFLFPPKPKDTLMISRTPEVTCVVVDVSHEDPEVKFNWYVDGVE | |
| | VHNAKTKPREEQYNSTYRVVSVLTVLHQDWLNGKEYKCKVSNKALPAPIEKTI | |
| | SKAKGQPREPQVYTLPPSRDELTKNQVSLTCLVKGFYPSDIAVEWESFGTEWS | Clone CH3C.35.20.1.1 |
| | SYKTTPPVLDSDGSFFLYSKLTVSKEEWQQGFVFSCSVMHEALHNHYTQKSLS | |
| | LSPGK | |
| 345 | APELLGGPSVFLFPPKPKDTLMISRTPEVTCVVVDVSHEDPEVKFNWYVDGVE | |
| | VHNAKTKPREEQYNSTYRVVSVLTVLHQDWLNGKEYKCKVSNKALPAPIEKTI | |
| | SKAKGQPREPQVYTLPPSRDELTKNQVSLTCLVKGFYPSDIAVEWESYGTEWA | Clone CH3C.35.23.2.1 |
| | NYKTTPPVLDSDGSFFLYSKLTVSKSEWQQGFVFSCSVMHEALHNHYTQKSLS | |
| | LSPGK | |
| 346 | APELLGGPSVFLFPPKPKDTLMISRTPEVTCVVVDVSHEDPEVKFNWYVDGVE | |
| | VHNAKTKPREEQYNSTYRVVSVLTVLHQDWLNGKEYKCKVSNKALPAPIEKTI | |
| | SKAKGQPREPQVYTLPPSRDELTKNQVSLTCLVKGFYPSDIAVEWESFGTEWS | Clone CH3C.35.23.1.1 |
| | NYKTTPPVLDSDGSFFLYSKLTVSKEEWQQGFVFSCSVMHEALHNHYTQKSLS | |
| | LSPGK | |
| 347 | APELLGGPSVFLFPPKPKDTLMISRTPEVTCVVVDVSHEDPEVKFNWYVDGVE | |
| | VHNAKTKPREEQYNSTYRVVSVLTVLHQDWLNGKEYKCKVSNKALPAPIEKTI | |
| | SKAKGQPREPQVYTLPPSRDELTKNQVSLTCLVKGFYPSDIAVEWESYGTEWS | Clone CH3C.35.S413 |
| | SYKTTPPVLDSDGSFFLYSKLTVSKSEWQQGFVFSCSVMHEALHNHYTQKSLS | |
| | LSPGK | |
| 348 | APELLGGPSVFLFPPKPKDTLMISRTPEVTCVVVDVSHEDPEVKFNWYVDGVE | |
| | VHNAKTKPREEQYNSTYRVVSVLTVLHQDWLNGKEYKCKVSNKALPAPIEKTI | |
| | SKAKGQPREPQVYTLPPSRDELTKNQVSLTCLVKGFYPSDIAVEWESYGTEWV | Clone CH3C.35.23.3.1 |
| | NYKTTPPVLDSDGSFFLYSKLTVSKEEWQQGFVFSCSVMHEALHNHYTQKSLS | |
| | LSPGK | |
| 349 | APELLGGPSVFLFPPKPKDTLMISRTPEVTCVVVDVSHEDPEVKFNWYVDGVE | |
| | VHNAKTKPREEQYNSTYRVVSVLTVLHQDWLNGKEYKCKVSNKALPAPIEKTI | |
| | SKAKGQPREPQVYTLPPSRDELTKNQVSLTCLVKGFYPSDIAVEWESYGTEWS | Clone CH3C.35.N390.1 |
| | NYKTTPPVLDSDGSFFLYSKLTVSKSEWQQGFVFSCSVMHEALHNHYTQKSLS | |
| | LSPGK | |
| 350 | APELLGGPSVFLFPPKPKDTLMISRTPEVTCVVVDVSHEDPEVKFNWYVDGVE | |
| | VHNAKTKPREEQYNSTYRVVSVLTVLHQDWLNGKEYKCKVSNKALPAPIEKTI | |
| | SKAKGQPREPQVYTLPPSRDELTKNQVSLTCLVKGFYPSDIAVEWESFGTEWV | Clone CH3C.35.23.6.1 |
| | NYKTTPPVLDSDGSFFLYSKLTVSKEEWQQGFVFSCSVMHEALHNHYTQKSLS | |
| | LSPGK | |
| 351 | APEAAGGPSVFLFPPKPKDTLMISRTPEVTCVVVDVSHEDPEVKFNWYVDGVE | Clone CH3C.35.21 with knob |
| | VHNAKTKPREEQYNSTYRVVSVLTVLHQDWLNGKEYKCKVSNKALGAPIEKTI | and LALAPG mutations |
| | SKAKGQPREPQVYTLPPSRDELTKNQVSLWCLVKGFYPSDIAVWWESYGTEWS | |
| | SYKTTPPVLDSDGSFFLYSKLTVTKEEWQQGFVFSCSVMHEALHNHYTQKSLS | |
| | LSPGK | |
| 352 | APEAAGGPSVFLFPPKPKDTLYITREPEVTCVVVDVSHEDPEVKFNWYVDGVE | Clone CH3C.35.21 with |
| | VHNAKTKPREEQYNSTYRVVSVLTVLHQDWLNGKEYKCKVSNKALGAPIEKTI | knob, LALAPG, and YTE |
| | SKAKGQPREPQVYTLPPSRDELTKNQVSLWCLVKGFYPSDIAVWWESYGTEWS | mutations |
| | SYKTTPPVLDSDGSFFLYSKLTVTKEEWQQGFVFSCSVMHEALHNHYTQKSLS | |
| | LSPGK | |
| 353 | APEAAGGPSVFLFPPKPKDTLMISRTPEVTCVVVDVSHEDPEVKFNWYVDGVE | Clone CH3C.35.21 with hole |
| | VHNAKTKPREEQYNSTYRVVSVLTVLHQDWLNGKEYKCKVSNKALGAPIEKTI | and LALAPG mutations |
| | SKAKGQPREPQVYTLPPSRDELTKNQVSLSCAVKGFYPSDIAVWWESYGTEWS | |
| | SYKTTPPVLDSDGSFFLVSKLTVTKEEWQQGFVFSCSVMHEALHNHYTQKSLS | |
| | LSPGK | |
| 354 | APEAAGGPSVFLFPPKPKDTLYITREPEVTCVVVDVSHEDPEVKFNWYVDGVE | |
| | VHNAKTKPREEQYNSTYRVVSVLTVLHQDWLNGKEYKCKVSNKALGAPIEKTI | Clone CH3C.35.21 with hole, |
| | SKAKGQPREPQVYTLPPSRDELTKNQVSLSCAVKGFYPSDIAVWWESYGTEWS | LALAPG, and YTE |
| | SYKTTPPVLDSDGSFFLVSKLTVTKEEWQQGFVFSCSVMHEALHNHYTQKSLS | mutations |
| | LSPGK | |
| 355 | APELLGGPSVFLFPPKPKDTLMISRTPEVTCVVVDVSHEDPEVKFNWYVDGVE | Clone CH3C.35.20.1.1 with |
| | VHNAKTKPREEQYNSTYRVVSVLTVLHQDWLNGKEYKCKVSNKALPAPIEKTI | knob mutation |
| | SKAKGQPREPQVYTLPPSRDELTKNQVSLWCLVKGFYPSDIAVEWESFGTEWS | |
| | SYKTTPPVLDSDGSFFLYSKLTVSKEEWQQGFVFSCSVMHEALHNHYTQKSLS | |
| | LSPGK | |
| 356 | APEAAGGPSVFLFPPKPKDTLMISRTPEVTCVVVDVSHEDPEVKFNWYVDGVE | Clone CH3C.35.20.1.1 with |
| | VHNAKTKPREEQYNSTYRVVSVLTVLHQDWLNGKEYKCKVSNKALPAPIEKTI | knob and LALA mutations |
| | SKAKGQPREPQVYTLPPSRDELTKNQVSLWCLVKGFYPSDIAVEWESFGTEWS | |
| | SYKTTPPVLDSDGSFFLYSKLTVSKEEWQQGFVFSCSVMHEALHNHYTQKSLS | |
| | LSPGK | |
| 357 | APEAAGGPSVFLFPPKPKDTLMISRTPEVTCVVVDVSHEDPEVKFNWYVDGVE | Clone CH3C.35.20.1.1 with |
| | VHNAKTKPREEQYNSTYRVVSVLTVLHQDWLNGKEYKCKVSNKALGAPIEKTI | knob and LALAPG |
| | SKAKGQPREPQVYTLPPSRDELTKNQVSLWCLVKGFYPSDIAVEWESFGTEWS | mutations |
| | SYKTTPPVLDSDGSFFLYSKLTVSKEEWQQGFVFSCSVMHEALHNHYTQKSLS | |
| | LSPGK | |
| 358 | APELLGGPSVFLFPPKPKDTLYITREPEVTCVVVDVSHEDPEVKFNWYVDGVE | Clone CH3C.35.20.1.1 with |
| | VHNAKTKPREEQYNSTYRVVSVLTVLHQDWLNGKEYKCKVSNKALPAPIEKTI | knob and YTE mutations |
| | SKAKGQPREPQVYTLPPSRDELTKNQVSLWCLVKGFYPSDIAVEWESFGTEWS | |
| | SYKTTPPVLDSDGSFFLYSKLTVSKEEWQQGFVFSCSVMHEALHNHYTQKSLS | |
| | LSPGK | |
| 359 | APEAAGGPSVFLFPPKPKDTLYITREPEVTCVVVDVSHEDPEVKFNWYVDGVE | Clone CH3C.35.20.1.1 with |
| | VHNAKTKPREEQYNSTYRVVSVLTVLHQDWLNGKEYKCKVSNKALPAPIEKTI | knob, LALA, and YTE |
| | SKAKGQPREPQVYTLPPSRDELTKNQVSLWCLVKGFYPSDIAVEWESFGTEWS | mutations |
| | SYKTTPPVLDSDGSFFLYSKLTVSKEEWQQGFVFSCSVMHEALHNHYTQKSLS | |
| | LSPGK | |
| 360 | APEAAGGPSVFLFPPKPKDTLYITREPEVTCVVVDVSHEDPEVKFNWYVDGVE | Clone CH3C.35.20.1.1 with |
| | VHNAKTKPREEQYNSTYRVVSVLTVLHQDWLNGKEYKCKVSNKALGAPIEKTI | knob, LALAPG, and YTE |
| | SKAKGQPREPQVYTLPPSRDELTKNQVSLWCLVKGFYPSDIAVEWESFGTEWS | mutations |
| | SYKTTPPVLDSDGSFFLYSKLTVSKEEWQQGFVFSCSVMHEALHNHYTQKSLS | |
| | LSPGK | |
| 361 | APELLGGPSVFLFPPKPKDTLMISRTPEVTCVVVDVSHEDPEVKFNWYVDGVE | Clone CH3C.35.20.1.1 with |
| | VHNAKTKPREEQYNSTYRVVSVLTVLHQDWLNGKEYKCKVSNKALPAPIEKTI | hole mutations |
| | SKAKGQPREPQVYTLPPSRDELTKNQVSLSCAVKGFYPSDIAVEWESFGTEWS | |
| | SYKTTPPVLDSDGSFFLVSKLTVSKEEWQQGFVFSCSVMHEALHNHYTQKSLS | |
| | LSPGK | |
| 362 | APEAAGGPSVFLFPPKPKDTLMISRTPEVTCVVVDVSHEDPEVKFNWYVDGVE | Clone CH3C.35.20.1.1 with |
| | VHNAKTKPREEQYNSTYRVVSVLTVLHQDWLNGKEYKCKVSNKALPAPIEKTI | hole and LALA mutations |
| | SKAKGQPREPQVYTLPPSRDELTKNQVSLSCAVKGFYPSDIAVEWESFGTEWS | |
| | SYKTTPPVLDSDGSFFLVSKLTVSKEEWQQGFVFSCSVMHEALHNHYTQKSLS | |
| | LSPGK | |
| 363 | APEAAGGPSVFLFPPKPKDTLMISRTPEVTCVVVDVSHEDPEVKFNWYVDGVE | Clone CH3C.35.20.1.1 with |
| | VHNAKTKPREEQYNSTYRVVSVLTVLHQDWLNGKEYKCKVSNKALGAPIEKTI | hole and LALAPG mutations |
| | SKAKGQPREPQVYTLPPSRDELTKNQVSLSCAVKGFYPSDIAVEWESFGTEWS | |
| | SYKTTPPVLDSDGSFFLVSKLTVSKEEWQQGFVFSCSVMHEALHNHYTQKSLS | |
| | LSPGK | |
| 364 | APELLGGPSVFLFPPKPKDTLYITREPEVTCVVVDVSHEDPEVKFNWYVDGVE | Clone CH3C.35.20.1.1 with |
| | VHNAKTKPREEQYNSTYRVVSVLTVLHQDWLNGKEYKCKVSNKALPAPIEKTI | hole and YTE mutations |
| | SKAKGQPREPQVYTLPPSRDELTKNQVSLSCAVKGFYPSDIAVEWESFGTEWS | |
| | SYKTTPPVLDSDGSFFLVSKLTVSKEEWQQGFVFSCSVMHEALHNHYTQKSLS | |
| | LSPGK | |
| 365 | APEAAGGPSVFLFPPKPKDTLYITREPEVTCVVVDVSHEDPEVKFNWYVDGVE | Clone CH3C.35.20.1.1 with |
| | VHNAKTKPREEQYNSTYRVVSVLTVLHQDWLNGKEYKCKVSNKALPAPIEKTI | hole, LALA, and YTE |
| | SKAKGQPREPQVYTLPPSRDELTKNQVSLSCAVKGFYPSDIAVEWESFGTEWS | mutations |
| | SYKTTPPVLDSDGSFFLVSKLTVSKEEWQQGFVFSCSVMHEALHNHYTQKSLS | |
| | LSPGK | |
| 366 | APEAAGGPSVFLFPPKPKDTLYITREPEVTCVVVDVSHEDPEVKFNWYVDGVE | Clone CH3C.35.20.1.1 with |
| | VHNAKTKPREEQYNSTYRVVSVLTVLHQDWLNGKEYKCKVSNKALGAPIEKTI | hole, LALAPG, and YTE |
| | SKAKGQPREPQVYTLPPSRDELTKNQVSLSCAVKGFYPSDIAVEWESFGTEWS | mutations |
| | SYKTTPPVLDSDGSFFLVSKLTVSKEEWQQGFVFSCSVMHEALHNHYTQKSLS | |
| | LSPGK | |
| 367 | APELLGGPSVFLFPPKPKDTLMISRTPEVTCVVVDVSHEDPEVKFNWYVDGVE | Clone CH3C.35.23.2.1 with |
| | VHNAKTKPREEQYNSTYRVVSVLTVLHQDWLNGKEYKCKVSNKALPAPIEKTI | knob mutation |
| | SKAKGQPREPQVYTLPPSRDELTKNQVSLWCLVKGFYPSDIAVEWESYGTEWA | |
| | NYKTTPPVLDSDGSFFLYSKLTVSKSEWQQGFVFSCSVMHEALHNHYTQKSLS | |
| | LSPGK | |
| 368 | APEAAGGPSVFLFPPKPKDTLMISRTPEVTCVVVDVSHEDPEVKFNWYVDGVE | Clone CH3C.35.23.2.1 with |
| | VHNAKTKPREEQYNSTYRVVSVLTVLHQDWLNGKEYKCKVSNKALPAPIEKTI | knob and LALA mutations |
| | SKAKGQPREPQVYTLPPSRDELTKNQVSLWCLVKGFYPSDIAVEWESYGTEWA | |
| | NYKTTPPVLDSDGSFFLYSKLTVSKSEWQQGFVFSCSVMHEALHNHYTQKSLS | |
| | LSPGK | |
| 369 | APEAAGGPSVFLFPPKPKDTLMISRTPEVTCVVVDVSHEDPEVKFNWYVDGVE | Clone CH3C.35.23.2.1 with |
| | VHNAKTKPREEQYNSTYRVVSVLTVLHQDWLNGKEYKCKVSNKALGAPIEKTI | knob and LALAPG mutations |
| | SKAKGQPREPQVYTLPPSRDELTKNQVSLWCLVKGFYPSDIAVEWESYGTEWA | |
| | NYKTTPPVLDSDGSFFLYSKLTVSKSEWQQGFVFSCSVMHEALHNHYTQKSLS | |
| | LSPGK | |
| 370 | APELLGGPSVFLFPPKPKDTLYITREPEVTCVVVDVSHEDPEVKFNWYVDGVE | Clone CH3C.35.23.2.1 with |
| | VHNAKTKPREEQYNSTYRVVSVLTVLHQDWLNGKEYKCKVSNKALPAPIEKTI | knob and YTE mutations |
| | SKAKGQPREPQVYTLPPSRDELTKNQVSLWCLVKGFYPSDIAVEWESYGTEWA | |
| | NYKTTPPVLDSDGSFFLYSKLTVSKSEWQQGFVFSCSVMHEALHNHYTQKSLS | |
| | LSPGK | |
| 371 | APEAAGGPSVFLFPPKPKDTLYITREPEVTCVVVDVSHEDPEVKFNWYVDGVE | Clone CH3C.35.23.2.1 with |
| | VHNAKTKPREEQYNSTYRVVSVLTVLHQDWLNGKEYKCKVSNKALPAPIEKTI | knob, LALA, and YTE |
| | SKAKGQPREPQVYTLPPSRDELTKNQVSLWCLVKGFYPSDIAVEWESYGTEWA | mutations |
| | NYKTTPPVLDSDGSFFLYSKLTVSKSEWQQGFVFSCSVMHEALHNHYTQKSLS | |
| | LSPGK | |
| 372 | APEAAGGPSVFLFPPKPKDTLYITREPEVTCVVVDVSHEDPEVKFNWYVDGVE | Clone CH3C.35.23.2.1 with |
| | VHNAKTKPREEQYNSTYRVVSVLTVLHQDWLNGKEYKCKVSNKALGAPIEKTI | knob, LALAPG, and YTE |
| | SKAKGQPREPQVYTLPPSRDELTKNQVSLWCLVKGFYPSDIAVEWESYGTEWA | mutations |
| | NYKTTPPVLDSDGSFFLYSKLTVSKSEWQQGFVFSCSVMHEALHNHYTQKSLS | |
| | LSPGK | |
| 373 | APELLGGPSVFLFPPKPKDTLMISRTPEVTCVVVDVSHEDPEVKFNWYVDGVE | Clone CH3C.35.23.2.1 with |
| | VHNAKTKPREEQYNSTYRVVSVLTVLHQDWLNGKEYKCKVSNKALPAPIEKTI | hole mutations |
| | SKAKGQPREPQVYTLPPSRDELTKNQVSLSCAVKGFYPSDIAVEWESYGTEWA | |
| | NYKTTPPVLDSDGSFFLVSKLTVSKSEWQQGFVFSCSVMHEALHNHYTQKSLS | |
| | LSPGK | |
| 374 | APEAAGGPSVFLFPPKPKDTLMISRTPEVTCVVVDVSHEDPEVKFNWYVDGVE | Clone CH3C.35.23.2.1 with |
| | VHNAKTKPREEQYNSTYRVVSVLTVLHQDWLNGKEYKCKVSNKALPAPIEKTI | hole and LALA mutations |
| | SKAKGQPREPQVYTLPPSRDELTKNQVSLSCAVKGFYPSDIAVEWESYGTEWA | |
| | NYKTTPPVLDSDGSFFLVSKLTVSKSEWQQGFVFSCSVMHEALHNHYTQKSLS | |
| | LSPGK | |
| 375 | APEAAGGPSVFLFPPKPKDTLMISRTPEVTCVVVDVSHEDPEVKFNWYVDGVE | Clone CH3C.35.23.2.1 with |
| | VHNAKTKPREEQYNSTYRVVSVLTVLHQDWLNGKEYKCKVSNKALGAPIEKTI | hole and LALAPG mutations |
| | SKAKGQPREPQVYTLPPSRDELTKNQVSLSCAVKGFYPSDIAVEWESYGTEWA | |
| | NYKTTPPVLDSDGSFFLVSKLTVSKSEWQQGFVFSCSVMHEALHNHYTQKSLS | |
| | LSPGK | |
| 376 | APELLGGPSVFLFPPKPKDTLYITREPEVTCVVVDVSHEDPEVKFNWYVDGVE | Clone CH3C.35.23.2.1 with |
| | VHNAKTKPREEQYNSTYRVVSVLTVLHQDWLNGKEYKCKVSNKALPAPIEKTI | hole and YTE mutations |
| | SKAKGQPREPQVYTLPPSRDELTKNQVSLSCAVKGFYPSDIAVEWESYGTEWA | |
| | NYKTTPPVLDSDGSFFLVSKLTVSKSEWQQGFVFSCSVMHEALHNHYTQKSLS | |
| | LSPGK | |
| 377 | APEAAGGPSVFLFPPKPKDTLYITREPEVTCVVVDVSHEDPEVKFNWYVDGVE | Clone CH3C.35.23.2.1 with |
| | VHNAKTKPREEQYNSTYRVVSVLTVLHQDWLNGKEYKCKVSNKALPAPIEKTI | hole, LALA, and YTE |
| | SKAKGQPREPQVYTLPPSRDELTKNQVSLSCAVKGFYPSDIAVEWESYGTEWA | mutations |
| | NYKTTPPVLDSDGSFFLVSKLTVSKSEWQQGFVFSCSVMHEALHNHYTQKSLS | |
| | LSPGK | |
| 378 | APEAAGGPSVFLFPPKPKDTLYITREPEVTCVVVDVSHEDPEVKFNWYVDGVE | Clone CH3C.35.23.2.1 with |
| | VHNAKTKPREEQYNSTYRVVSVLTVLHQDWLNGKEYKCKVSNKALGAPIEKTI | hole, LALAPG, and YTE |
| | SKAKGQPREPQVYTLPPSRDELTKNQVSLSCAVKGFYPSDIAVEWESYGTEWA | SDGSFFLV mutations |
| | NYKTTPPVLDSKLTVSKSEWQQGFVFSCSVMHEALHNHYTQKSLS | |
| | LSPGK | |
| 379 | APELLGGPSVFLFPPKPKDTLMISRTPEVTCVVVDVSHEDPEVKFNWYVDGVE | Clone CH3C.35.23.1.1 with |
| | VHNAKTKPREEQYNSTYRVVSVLTVLHQDWLNGKEYKCKVSNKALPAPIEKTI | knob mutation |
| | SKAKGQPREPQVYTLPPSRDELTKNQVSLWCLVKGFYPSDIAVEWESFGTEWS | |
| | NYKTTPPVLDSDGSFFLYSKLTVSKEEWQQGFVFSCSVMHEALHNHYTQKSLS | |
| | LSPGK | |
| 380 | APEAAGGPSVFLFPPKPKDTLMISRTPEVTCVVVDVSHEDPEVKFNWYVDGVE | Clone CH3C.35.23.1.1 with |
| | VHNAKTKPREEQYNSTYRVVSVLTVLHQDWLNGKEYKCKVSNKALPAPIEKTI | knob and LALA mutations |
| | SKAKGQPREPQVYTLPPSRDELTKNQVSLWCLVKGFYPSDIAVEWESFGTEWS | |
| | NYKTTPPVLDSDGSFFLYSKLTVSKEEWQQGFVFSCSVMHEALHNHYTQKSLS | |
| | LSPGK | |
| 381 | APEAAGGPSVFLFPPKPKDTLMISRTPEVTCVVVDVSHEDPEVKFNWYVDGVE | Clone CH3C.35.23.1.1 with |
| | VHNAKTKPREEQYNSTYRVVSVLTVLHQDWLNGKEYKCKVSNKALGAPIEKTI | knob and LALAPG |
| | SKAKGQPREPQVYTLPPSRDELTKNQVSLWCLVKGFYPSDIAVEWESFGTEWS | mutations |
| | NYKTTPPVLDSDGSFFLYSKLTVSKEEWQQGFVFSCSVMHEALHNHYTQKSLS | |
| | LSPGK | |
| 382 | APELLGGPSVFLFPPKPKDTLYITREPEVTCVVVDVSHEDPEVKFNWYVDGVE | Clone CH3C.35.23.1.1 with |
| | VHNAKTKPREEQYNSTYRVVSVLTVLHQDWLNGKEYKCKVSNKALPAPIEKTI | knob and YI E mutations |
| | SKAKGQPREPQVYTLPPSRDELTKNQVSLWCLVKGFYPSDIAVEWESFGTEWS | |
| | NYKTTPPVLDSDGSFFLYSKLTVSKEEWQQGFVFSCSVMHEALHNHYTQKSLS | |
| | LSPGK | |
| 383 | APEAAGGPSVFLFPPKPKDTLYITREPEVTCVVVDVSHEDPEVKFNWYVDGVE | Clone CH3C.35.23.1.1 with |
| | VHNAKTKPREEQYNSTYRVVSVLTVLHQDWLNGKEYKCKVSNKALPAPIEKTI | knob, LALA, and YTE |
| | SKAKGQPREPQVYTLPPSRDELTKNQVSLWCLVKGFYPSDIAVEWESFGTEWS | mutations |
| | NYKTTPPVLDSDGSFFLYSKLTVSKEEWQQGFVFSCSVMHEALHNHYTQKSLS | |
| | LSPGK | |
| 384 | APEAAGGPSVFLFPPKPKDTLYITREPEVTCVVVDVSHEDPEVKFNWYVDGVE | Clone CH3C.35.23.1.1 with |
| | VHNAKTKPREEQYNSTYRVVSVLTVLHQDWLNGKEYKCKVSNKALGAPIEKTI | knob, LALAPG, and YTE |
| | SKAKGQPREPQVYTLPPSRDELTKNQVSLWCLVKGFYPSDIAVEWESFGTEWS | mutations |
| | NYKTTPPVLDSDGSFFLYSKLTVSKEEWQQGFVFSCSVMHEALHNHYTQKSLS | |
| | LSPGK | |
| 385 | APELLGGPSVFLFPPKPKDTLMISRTPEVTCVVVDVSHEDPEVKFNWYVDGVE | Clone CH3C.35.23.1.1 with |
| | VHNAKTKPREEQYNSTYRVVSVLTVLHQDWLNGKEYKCKVSNKALPAPIEKTI | hole mutations |
| | SKAKGQPREPQVYTLPPSRDELTKNQVSLSCAVKGFYPSDIAVEWESFGTEWS | |
| | NYKTTPPVLDSDGSFFLVSKLTVSKEEWQQGFVFSCSVMHEALHNHYTQKSLS | |
| | LSPGK | |
| 386 | APEAAGGPSVFLFPPKPKDTLMISRTPEVTCVVVDVSHEDPEVKFNWYVDGVE | Clone CH3C.35.23.1.1 with |
| | VHNAKTKPREEQYNSTYRVVSVLTVLHQDWLNGKEYKCKVSNKALPAPIEKTI | hole and LALA mutations |
| | SKAKGQPREPQVYTLPPSRDELTKNQVSLSCAVKGFYPSDIAVEWESFGTEWS | |
| | NYKTTPPVLDSDGSFFLVSKLTVSKEEWQQGFVFSCSVMHEALHNHYTQKSLS | |
| | LSPGK | |
| 387 | APEAAGGPSVFLFPPKPKDTLMISRTPEVTCVVVDVSHEDPEVKFNWYVDGVE | Clone CH3C.35.23.1.1 with |
| | VHNAKTKPREEQYNSTYRVVSVLTVLHQDWLNGKEYKCKVSNKALGAPIEKTI | hole and LALAPG mutations |
| | SKAKGQPREPQVYTLPPSRDELTKNQVSLSCAVKGFYPSDIAVEWESFGTEWS | |
| | NYKTTPPVLDSDGSFFLVSKLTVSKEEWQQGFVFSCSVMHEALHNHYTQKSLS | |
| | LSPGK | |
| 388 | APELLGGPSVFLFPPKPKDTLYITREPEVTCVVVDVSHEDPEVKFNWYVDGVE | Clone CH3C.35.23.1.1 with |
| | VHNAKTKPREEQYNSTYRVVSVLTVLHQDWLNGKEYKCKVSNKALPAPIEKTI | hole and YTE mutations |
| | SKAKGQPREPQVYTLPPSRDELTKNQVSLSCAVKGFYPSDIAVEWESFGTEWS | |
| | NYKTTPPVLDSDGSFFLVSKLTVSKEEWQQGFVFSCSVMHEALHNHYTQKSLS | |
| | LSPGK | |
| 389 | APEAAGGPSVFLFPPKPKDTLYITREPEVTCVVVDVSHEDPEVKFNWYVDGVE | Clone CH3C.35.23.1.1 with |
| | VHNAKTKPREEQYNSTYRVVSVLTVLHQDWLNGKEYKCKVSNKALPAPIEKTI | hole, LALA, and YTE |
| | SKAKGQPREPQVYTLPPSRDELTKNQVSLSCAVKGFYPSDIAVEWESFGTEWS | mutations |
| | NYKTTPPVLDSDGSFFLVSKLTVSKEEWQQGFVFSCSVMHEALHNHYTQKSLS | |
| | LSPGK | |
| 390 | APEAAGGPSVFLFPPKPKDTLYITREPEVTCVVVDVSHEDPEVKFNWYVDGVE | Clone CH3C.35.23.1.1 with |
| | VHNAKTKPREEQYNSTYRVVSVLTVLHQDWLNGKEYKCKVSNKALGAPIEKTI | hole, LALAPG, and YTE |
| | SKAKGQPREPQVYTLPPSRDELTKNQVSLSCAVKGFYPSDIAVEWESFGTEWS | mutations |
| | NYKTTPPVLDSDGSFFLVSKLTVSKEEWQQGFVFSCSVMHEALHNHYTQKSLS | |
| | LSPGK | |
| 391 | APELLGGPSVFLFPPKPKDTLMISRTPEVTCVVVDVSHEDPEVKFNWYVDGVE | Clone CH3C.35.20.1 M428L |
| | VHNAKTKPREEQYNSTYRVVSVLTVLHQDWLNGKEYKCKVSNKALPAPIEKTI | and N434S mutations |
| | SKAKGQPREPQVYTLPPSRDELTKNQVSLTCLVKGFYPSDIAVEWESFGTEWS | |
| | SYKTTPPVLDSDGSFFLYSKLTVTKEEWQQGFVFSCSVLHEALHSHYTQKSLS | |
| | LSPGK | |
| 392 | APELLGGPSVFLFPPKPKDTLMISRTPEVTCVVVDVSHEDPEVKFNWYVDGVE | Clone CH3C.35.20.1 with |
| | VHNAKTKPREEQYNSTYRVVSVLTVLHQDWLNGKEYKCKVSNKALPAPIEKTI | knob and M428L and N4345 |
| | SKAKGQPREPQVYTLPPSRDELTKNQVSLWCLVKGFYPSDIAVEWESFGTEWS | mutations |
| | SYKTTPPVLDSDGSFFLYSKLTVTKEEWQQGFVFSCSVLHEALHSHYTQKSLS | |
| | LSPGK | |
| 393 | APEAAGGPSVFLFPPKPKDTLMISRTPEVTCVVVDVSHEDPEVKFNWYVDGVE | Clone CH3C.35.20.1 with |
| | VHNAKTKPREEQYNSTYRVVSVLTVLHQDWLNGKEYKCKVSNKALPAPIEKTI | knob, LALA, and M428L and |
| | SKAKGQPREPQVYTLPPSRDELTKNQVSLWCLVKGFYPSDIAVEWESFGTEWS | N4345 mutations |
| | SYKTTPPVLDSDGSFFLYSKLTVTKEEWQQGFVFSCSVLHEALHSHYTQKSLS | |
| | LSPGK | |
| 394 | APEAAGGPSVFLFPPKPKDTLMISRTPEVTCVVVDVSHEDPEVKFNWYVDGVE | Clone CH3C.35.20.1 with |
| | VHNAKTKPREEQYNSTYRVVSVLTVLHQDWLNGKEYKCKVSNKALGAPIEKTI | knob, LALAPG, and M428L |
| | SKAKGQPREPQVYTLPPSRDELTKNQVSLWCLVKGFYPSDIAVEWESFGTEWS | and N4345 mutations |
| | SYKTTPPVLDSDGSFFLYSKLTVTKEEWQQGFVFSCSVLHEALHSHYTQKSLS | |
| | LSPGK | |
| 395 | APELLGGPSVFLFPPKPKDTLMISRTPEVTCVVVDVSHEDPEVKFNWYVDGVE | Clone CH3C.35.20.1 with |
| | VHNAKTKPREEQYNSTYRVVSVLTVLHQDWLNGKEYKCKVSNKALPAPIEKTI | hole and M428L and N4345 |
| | SKAKGQPREPQVYTLPPSRDELTKNQVSLSCAVKGFYPSDIAVEWESFGTEWS | mutations |
| | SYKTTPPVLDSDGSFFLVSKLTVTKEEWQQGFVFSCSVLHEALHSHYTQKSLS | |
| | LSPGK | |
| 396 | APEAAGGPSVFLFPPKPKDTLMISRTPEVTCVVVDVSHEDPEVKFNWYVDGVE | Clone CH3C.35.20.1 with |
| | VHNAKTKPREEQYNSTYRVVSVLTVLHQDWLNGKEYKCKVSNKALPAPIEKTI | hole, LALA, and M428L and |
| | SKAKGQPREPQVYTLPPSRDELTKNQVSLSCAVKGFYPSDIAVEWESFGTEWS | N4345 mutations |
| | SYKTTPPVLDSDGSFFLVSKLTVTKEEWQQGFVFSCSVLHEALHSHYTQKSLS | |
| | LSPGK | |
| 397 | APEAAGGPSVFLFPPKPKDTLMISRTPEVTCVVVDVSHEDPEVKFNWYVDGVE | Clone CH3C.35.20.1 with |
| | VHNAKTKPREEQYNSTYRVVSVLTVLHQDWLNGKEYKCKVSNKALGAPIEKTI | hole, LALAPG, and M428L |
| | SKAKGQPREPQVYTLPPSRDELTKNQVSLSCAVKGFYPSDIAVEWESFGTEWS | and N4345 mutations |
| | SYKTTPPVLDSDGSFFLVSKLTVTKEEWQQGFVFSCSVLHEALHSHYTQKSLS | |
| | LSPGK | |
| 398 | APELLGGPSVFLFPPKPKDTLMISRTPEVTCVVVDVSHEDPEVKFNWYVDGVE | Clone CH3C.35.20.1.1 with |
| | VHNAKTKPREEQYNSTYRVVSVLTVLHQDWLNGKEYKCKVSNKALPAPIEKTI | M428L and N4345 mutations |
| | SKAKGQPREPQVYTLPPSRDELTKNQVSLTCLVKGFYPSDIAVEWESFGTEWS | |
| | SYKTTPPVLDSDGSFFLYSKLTVSKEEWQQGFVFSCSVLHEALHSHYTQKSLS | |
| | LSPGK | |
| 399 | APELLGGPSVFLFPPKPKDTLMISRTPEVTCVVVDVSHEDPEVKFNWYVDGVE | Clone CH3C.35.20.1.1 with |
| | VHNAKTKPREEQYNSTYRVVSVLTVLHQDWLNGKEYKCKVSNKALPAPIEKTI | knob and M428L and N4345 |
| | SKAKGQPREPQVYTLPPSRDELTKNQVSLWCLVKGFYPSDIAVEWESFGTEWS | mutations |
| | SYKTTPPVLDSDGSFFLYSKLTVSKEEWQQGFVFSCSVLHEALHSHYTQKSLS | |
| | LSPGK | |
| 400 | APEAAGGPSVFLFPPKPKDTLMISRTPEVTCVVVDVSHEDPEVKFNWYVDGVE | Clone CH3C.35.20.1.1 with |
| | VHNAKTKPREEQYNSTYRVVSVLTVLHQDWLNGKEYKCKVSNKALPAPIEKTI | knob, LALA, and M428L and |
| | SKAKGQPREPQVYTLPPSRDELTKNQVSLWCLVKGFYPSDIAVEWESFGTEWS | N434S mutations |
| | SYKTTPPVLDSDGSFFLYSKLTVSKEEWQQGFVFSCSVLHEALHSHYTQKSLS | |
| | LSPGK | |
| 401 | APEAAGGPSVFLFPPKPKDTLMISRTPEVTCVVVDVSHEDPEVKFNWYVDGVE | Clone CH3C.35.20.1.1 with |
| | VHNAKTKPREEQYNSTYRVVSVLTVLHQDWLNGKEYKCKVSNKALGAPIEKTI | knob, LALAPG, and M428L |
| | SKAKGQPREPQVYTLPPSRDELTKNQVSLWCLVKGFYPSDIAVEWESFGTEWS | and N434S mutations |
| | SYKTTPPVLDSDGSFFLYSKLTVSKEEWQQGFVFSCSVLHEALHSHYTQKSLS | |
| | LSPGK | |
| 402 | APELLGGPSVFLFPPKPKDTLMISRTPEVTCVVVDVSHEDPEVKFNWYVDGVE | Clone CH3C.35.20.1.1 with |
| | VHNAKTKPREEQYNSTYRVVSVLTVLHQDWLNGKEYKCKVSNKALPAPIEKTI | hole and M428L and N434S |
| | SKAKGQPREPQVYTLPPSRDELTKNQVSLSCAVKGFYPSDIAVEWESFGTEWS | mutations |
| | SYKTTPPVLDSDGSFFLVSKLTVSKEEWQQGFVFSCSVLHEALHSHYTQKSLS | |
| | LSPGK | |
| 403 | APEAAGGPSVFLFPPKPKDTLMISRTPEVTCVVVDVSHEDPEVKFNWYVDGVE | Clone CH3C.35.20.1.1 with |
| | VHNAKTKPREEQYNSTYRVVSVLTVLHQDWLNGKEYKCKVSNKALPAPIEKTI | hole, LALA, and M428L and |
| | SKAKGQPREPQVYTLPPSRDELTKNQVSLSCAVKGFYPSDIAVEWESFGTEWS | N434S mutations |
| | SYKTTPPVLDSDGSFFLVSKLTVSKEEWQQGFVFSCSVLHEALHSHYTQKSLS | |
| | LSPGK | |
| 404 | APEAAGGPSVFLFPPKPKDTLMISRTPEVTCVVVDVSHEDPEVKFNWYVDGVE | Clone CH3C.35.20.1.1 with |
| | VHNAKTKPREEQYNSTYRVVSVLTVLHQDWLNGKEYKCKVSNKALGAPIEKTI | hole, LALAPG, and M428L |
| | SKAKGQPREPQVYTLPPSRDELTKNQVSLSCAVKGFYPSDIAVEWESFGTEWS | and N434S mutations |
| | SYKTTPPVLDSDGSFFLVSKLTVSKEEWQQGFVFSCSVLHEALHSHYTQKSLS | |
| | LSPGK | |
| 405 | APELLGGPSVFLFPPKPKDTLMISRTPEVTCVVVDVSHEDPEVKFNWYVDGVE | Clone CH3C.35.21 with |
| | VHNAKTKPREEQYNSTYRVVSVLTVLHQDWLNGKEYKCKVSNKALPAPIEKTI | M428L and N434S mutations |
| | SKAKGQPREPQVYTLPPSRDELTKNQVSLTCLVKGFYPSDIAVWWESYGTEWS | |
| | SYKTTPPVLDSDGSFFLYSKLTVTKEEWQQGFVFSCSVLHEALHSHYTQKSLS | |
| | LSPGK | |
| 406 | APELLGGPSVFLFPPKPKDTLMISRTPEVTCVVVDVSHEDPEVKFNWYVDGVE | Clone CH3C.35.21 with knob |
| | VHNAKTKPREEQYNSTYRVVSVLTVLHQDWLNGKEYKCKVSNKALPAPIEKTI | and M428L and N434S |
| | SKAKGQPREPQVYTLPPSRDELTKNQVSLWCLVKGFYPSDIAVWWESYGTEWS | mutations |
| | SYKTTPPVLDSDGSFFLYSKLTVTKEEWQQGFVFSCSVLHEALHSHYTQKSLS | |
| | LSPGK | |
| 407 | APEAAGGPSVFLFPPKPKDTLMISRTPEVTCVVVDVSHEDPEVKFNWYVDGVE | Clone CH3C.35.21 with |
| | VHNAKTKPREEQYNSTYRVVSVLTVLHQDWLNGKEYKCKVSNKALPAPIEKTI | knob, LALA, and M428L and |
| | SKAKGQPREPQVYTLPPSRDELTKNQVSLWCLVKGFYPSDIAVWWESYGTEWS | N434S mutations |
| | SYKTTPPVLDSDGSFFLYSKLTVTKEEWQQGFVFSCSVLHEALHSHYTQKSLS | |
| | LSPGK | |
| 408 | APEAAGGPSVFLFPPKPKDTLMISRTPEVTCVVVDVSHEDPEVKFNWYVDGVE | Clone CH3C.35.21 with |
| | VHNAKTKPREEQYNSTYRVVSVLTVLHQDWLNGKEYKCKVSNKALGAPIEKTI | knob, LALAPG, and M428L |
| | SKAKGQPREPQVYTLPPSRDELTKNQVSLWCLVKGFYPSDIAVWWESYGTEWS | and N434S mutations |
| | SYKTTPPVLDSDGSFFLYSKLTVTKEEWQQGFVFSCSVLHEALHSHYTQKSLS | |
| | LSPGK | |
| 409 | APELLGGPSVFLFPPKPKDTLMISRTPEVTCVVVDVSHEDPEVKFNWYVDGVE | Clone CH3C.35.21 with hole |
| | VHNAKTKPREEQYNSTYRVVSVLTVLHQDWLNGKEYKCKVSNKALPAPIEKTI | and M428L and N434S |
| | SKAKGQPREPQVYTLPPSRDELTKNQVSLSCAVKGFYPSDIAVWWESYGTEWS | mutations |
| | SYKTTPPVLDSDGSFFLVSKLTVTKEEWQQGFVFSCSVLHEALHSHYTQKSLS | |
| | LSPGK | |
| 410 | APEAAGGPSVFLFPPKPKDTLMISRTPEVTCVVVDVSHEDPEVKFNWYVDGVE | Clone CH3C.35.21 with hole, |
| | VHNAKTKPREEQYNSTYRVVSVLTVLHQDWLNGKEYKCKVSNKALPAPIEKTI | LALA, and M428L and |
| | SKAKGQPREPQVYTLPPSRDELTKNQVSLSCAVKGFYPSDIAVWWESYGTEWS | N434S mutations |
| | SYKTTPPVLDSDGSFFLVSKLTVTKEEWQQGFVFSCSVLHEALHSHYTQKSLS | |
| | LSPGK | |
| 411 | APEAAGGPSVFLFPPKPKDTLMISRTPEVTCVVVDVSHEDPEVKFNWYVDGVE | Clone CH3C.35.21 with hole, |
| | VHNAKTKPREEQYNSTYRVVSVLTVLHQDWLNGKEYKCKVSNKALGAPIEKTI | LALAPG, and M428L and |
| | SKAKGQPREPQVYTLPPSRDELTKNQVSLSCAVKGFYPSDIAVWWESYGTEWS | N434S mutations |
| | SYKTTPPVLDSDGSFFLVSKLTVTKEEWQQGFVFSCSVLHEALHSHYTQKSLS | |
| | LSPGK | |
| 412 | APELLGGPSVFLFPPKPKDTLMISRTPEVTCVVVDVSHEDPEVKFNWYVDGVE | Clone CH3C.35.21.17.2 with |
| | VHNAKTKPREEQYNSTYRVVSVLTVLHQDWLNGKEYKCKVSNKALPAPIEKTI | M428L and N434S mutations |
| | SKAKGQPREPQVYTLPPSRDELTKNQVSLTCLVKGFYPSDIAVLWESYGTEWA | |
| | SYKTTPPVLDSDGSFFLYSKLTVTKEEWQQGFVFSCSVLHEALHSHYTQKSLS | |
| | LSPGK | |
| 413 | APELLGGPSVFLFPPKPKDTLMISRTPEVTCVVVDVSHEDPEVKFNWYVDGVE | Clone CH3C.35.21.17.2 with |
| | VHNAKTKPREEQYNSTYRVVSVLTVLHQDWLNGKEYKCKVSNKALPAPIEKTI | knob and M428L and N434S |
| | SKAKGQPREPQVYTLPPSRDELTKNQVSLWCLVKGFYPSDIAVLWESYGTEWA | mutations |
| | SYKTTPPVLDSDGSFFLYSKLTVTKEEWQQGFVFSCSVLHEALHSHYTQKSLS | |
| | LSPGK | |
| 414 | APEAAGGPSVFLFPPKPKDTLMISRTPEVTCVVVDVSHEDPEVKFNWYVDGVE | Clone CH3C.35.21.17.2 with |
| | VHNAKTKPREEQYNSTYRVVSVLTVLHQDWLNGKEYKCKVSNKALPAPIEKTI | knob, LALA, and M428L and |
| | SKAKGQPREPQVYTLPPSRDELTKNQVSLWCLVKGFYPSDIAVLWESYGTEWA | N434S mutations |
| | SYKTTPPVLDSDGSFFLYSKLTVTKEEWQQGFVFSCSVLHEALHSHYTQKSLS | |
| | LSPGK | |
| 415 | APEAAGGPSVFLFPPKPKDTLMISRTPEVTCVVVDVSHEDPEVKFNWYVDGVE | Clone CH3C.35.21.17.2 with |
| | VHNAKTKPREEQYNSTYRVVSVLTVLHQDWLNGKEYKCKVSNKALGAPIEKTI | knob, LALAPG, and M428L |
| | SKAKGQPREPQVYTLPPSRDELTKNQVSLWCLVKGFYPSDIAVLWESYGTEWA | and N434S mutations |
| | SYKTTPPVLDSDGSFFLYSKLTVTKEEWQQGFVFSCSVLHEALHSHYTQKSLS | |
| | LSPGK | |
| 416 | APELLGGPSVFLFPPKPKDTLMISRTPEVTCVVVDVSHEDPEVKFNWYVDGVE | Clone CH3C.35.21.17.2 with |
| | VHNAKTKPREEQYNSTYRVVSVLTVLHQDWLNGKEYKCKVSNKALPAPIEKTI | hole and M428L and N434S |
| | SKAKGQPREPQVYTLPPSRDELTKNQVSLSCAVKGFYPSDIAVLWESYGTEWA | mutations |
| | SYKTTPPVLDSDGSFFLVSKLTVTKEEWQQGFVFSCSVLHEALHSHYTQKSLS | |
| | LSPGK | |
| 417 | APEAAGGPSVFLFPPKPKDTLMISRTPEVTCVVVDVSHEDPEVKFNWYVDGVE | Clone CH3C.35.21.17.2 with |
| | VHNAKTKPREEQYNSTYRVVSVLTVLHQDWLNGKEYKCKVSNKALPAPIEKTI | hole, LALA, and M428L and |
| | SKAKGQPREPQVYTLPPSRDELTKNQVSLSCAVKGFYPSDIAVLWESYGTEWA | N434S mutations |
| | SYKTTPPVLDSDGSFFLVSKLTVTKEEWQQGFVFSCSVLHEALHSHYTQKSLS | |
| | LSPGK | |
| 418 | APEAAGGPSVFLFPPKPKDTLMISRTPEVTCVVVDVSHEDPEVKFNWYVDGVE | Clone CH3C.35.21.17.2 with |
| | VHNAKTKPREEQYNSTYRVVSVLTVLHQDWLNGKEYKCKVSNKALGAPIEKTI | hole, LALAPG, and M428L |
| | SKAKGQPREPQVYTLPPSRDELTKNQVSLSCAVKGFYPSDIAVLWESYGTEWA | and N434S mutations |
| | SYKTTPPVLDSDGSFFLVSKLTVTKEEWQQGFVFSCSVLHEALHSHYTQKSLS | |
| | LSPGK | |
| 419 | APELLGGPSVFLFPPKPKDTLMISRTPEVTCVVVDVSHEDPEVKFNWYVDGVE | Clone CH3C.35.23 with |
| | VHNAKTKPREEQYNSTYRVVSVLTVLHQDWLNGKEYKCKVSNKALPAPIEKTI | M428L and N434S mutations |
| | SKAKGQPREPQVYTLPPSRDELTKNQVSLTCLVKGFYPSDIAVEWESYGTEWS | SDGSFFLYS |
| | NYKTTPPVLDKLTVTKEEWQQGFVFSCSVLHEALHSHYTQKSLS | |
| | LSPGK | |
| 420 | APELLGGPSVFLFPPKPKDTLMISRTPEVTCVVVDVSHEDPEVKFNWYVDGVE | Clone CH3C.35.23 with knob |
| | VHNAKTKPREEQYNSTYRVVSVLTVLHQDWLNGKEYKCKVSNKALPAPIEKTI | and M428L and N434S |
| | SKAKGQPREPQVYTLPPSRDELTKNQVSLWCLVKGFYPSDIAVEWESYGTEWS | mutations |
| | NYKTTPPVLDSDGSFFLYSKLTVTKEEWQQGFVFSCSVLHEALHSHYTQKSLS | |
| | LSPGK | |
| 421 | APEAAGGPSVFLFPPKPKDTLMISRTPEVTCVVVDVSHEDPEVKFNWYVDGVE | Clone CH3C.35.23 with |
| | VHNAKTKPREEQYNSTYRVVSVLTVLHQDWLNGKEYKCKVSNKALPAPIEKTI | knob, LALA, and M428L and |
| | SKAKGQPREPQVYTLPPSRDELTKNQVSLWCLVKGFYPSDIAVEWESYGTEWS | N434S mutations |
| | NYKTTPPVLDSDGSFFLYSKLTVTKEEWQQGFVFSCSVLHEALHSHYTQKSLS | |
| | LSPGK | |
| 422 | APEAAGGPSVFLFPPKPKDTLMISRTPEVTCVVVDVSHEDPEVKFNWYVDGVE | Clone CH3C.35.23 with |
| | VHNAKTKPREEQYNSTYRVVSVLTVLHQDWLNGKEYKCKVSNKALGAPIEKTI | knob, LALAPG, and M428L |
| | SKAKGQPREPQVYTLPPSRDELTKNQVSLWCLVKGFYPSDIAVEWESYGTEWS | and N434S mutations |
| | NYKTTPPVLDSDGSFFLYSKLTVTKEEWQQGFVFSCSVLHEALHSHYTQKSLS | |
| | LSPGK | |
| 423 | APELLGGPSVFLFPPKPKDTLMISRTPEVTCVVVDVSHEDPEVKFNWYVDGVE | Clone CH3C.35.23 with hole |
| | VHNAKTKPREEQYNSTYRVVSVLTVLHQDWLNGKEYKCKVSNKALPAPIEKTI | and M428L and N434S |
| | SKAKGQPREPQVYTLPPSRDELTKNQVSLSCAVKGFYPSDIAVEWESYGTEWS | mutations |
| | NYKTTPPVLDSDGSFFLVSKLTVTKEEWQQGFVFSCSVLHEALHSHYTQKSLS | |
| | LSPGK | |
| 424 | APEAAGGPSVFLFPPKPKDTLMISRTPEVTCVVVDVSHEDPEVKFNWYVDGVE | Clone CH3C.35.23 with hole, |
| | VHNAKTKPREEQYNSTYRVVSVLTVLHQDWLNGKEYKCKVSNKALPAPIEKTI | LALA, and M428L and |
| | SKAKGQPREPQVYTLPPSRDELTKNQVSLSCAVKGFYPSDIAVEWESYGTEWS | N434S mutations |
| | NYKTTPPVLDSDGSFFLVSKLTVTKEEWQQGFVFSCSVLHEALHSHYTQKSLS | |
| | LSPGK | |
| 425 | APEAAGGPSVFLFPPKPKDTLMISRTPEVTCVVVDVSHEDPEVKFNWYVDGVE | Clone CH3C.35.23 with hole, |
| | VHNAKTKPREEQYNSTYRVVSVLTVLHQDWLNGKEYKCKVSNKALGAPIEKTI | LALAPG, and M428L and |
| | SKAKGQPREPQVYTLPPSRDELTKNQVSLSCAVKGFYPSDIAVEWESYGTEWS | N434S mutations |
| | NYKTTPPVLDSDGSFFLVSKLTVTKEEWQQGFVFSCSVLHEALHSHYTQKSLS | |
| | LSPGK | |
| 426 | APELLGGPSVFLFPPKPKDTLMISRTPEVTCVVVDVSHEDPEVKFNWYVDGVE | Clone CH3C.35.23.1.1 with |
| | VHNAKTKPREEQYNSTYRVVSVLTVLHQDWLNGKEYKCKVSNKALPAPIEKTI | M428L and N434S mutations |
| | SKAKGQPREPQVYTLPPSRDELTKNQVSLTCLVKGFYPSDIAVEWESFGTEWS | |
| | NYKTTPPVLDSDGSFFLYSKLTVSKEEWQQGFVFSCSVLHEALHSHYTQKSLS | |
| | LSPGK | |
| 427 | APELLGGPSVFLFPPKPKDTLMISRTPEVTCVVVDVSHEDPEVKFNWYVDGVE | |
| | VHNAKTKPREEQYNSTYRVVSVLTVLHQDWLNGKEYKCKVSNKALPAPIEKTI | Clone CH3C.35.23.1.1 with |
| | SKAKGQPREPQVYTLPPSRDELTKNQVSLWCLVKGFYPSDIAVEWESFGTEWS | knob and M428L and N434S |
| | NYKTTPPVLDSDGSFFLYSKLTVSKEEWQQGFVFSCSVLHEALHSHYTQKSLS | mutations |
| | LSPGK | |
| 428 | APEAAGGPSVFLFPPKPKDTLMISRTPEVTCVVVDVSHEDPEVKFNWYVDGVE | Clone CH3C.35.23.1.1 with |
| | VHNAKTKPREEQYNSTYRVVSVLTVLHQDWLNGKEYKCKVSNKALPAPIEKTI | knob, LALA, and M428L and |
| | SKAKGQPREPQVYTLPPSRDELTKNQVSLWCLVKGFYPSDIAVEWESFGTEWS | N434S mutations |
| | NYKTTPPVLDSDGSFFLYSKLTVSKEEWQQGFVFSCSVLHEALHSHYTQKSLS | |
| | LSPGK | |
| 429 | APEAAGGPSVFLFPPKPKDTLMISRTPEVTCVVVDVSHEDPEVKFNWYVDGVE | Clone CH3C.35.23.1.1 with |
| | VHNAKTKPREEQYNSTYRVVSVLTVLHQDWLNGKEYKCKVSNKALGAPIEKTI | knob, LALAPG, and M428L |
| | SKAKGQPREPQVYTLPPSRDELTKNQVSLWCLVKGFYPSDIAVEWESFGTEWS | and N434S mutations |
| | NYKTTPPVLDSDGSFFLYSKLTVSKEEWQQGFVFSCSVLHEALHSHYTQKSLS | |
| | LSPGK | |
| 430 | APELLGGPSVFLFPPKPKDTLMISRTPEVTCVVVDVSHEDPEVKFNWYVDGVE | Clone CH3C.35.23.1.1 with |
| | VHNAKTKPREEQYNSTYRVVSVLTVLHQDWLNGKEYKCKVSNKALPAPIEKTI | hole and M428L and N434S |
| | SKAKGQPREPQVYTLPPSRDELTKNQVSLSCAVKGFYPSDIAVEWESFGTEWS | mutations |
| | NYKTTPPVLDSDGSFFLVSKLTVSKEEWQQGFVFSCSVLHEALHSHYTQKSLS | |
| | LSPGK | |
| 431 | APEAAGGPSVFLFPPKPKDTLMISRTPEVTCVVVDVSHEDPEVKFNWYVDGVE | Clone CH3C.35.23.1.1 with |
| | VHNAKTKPREEQYNSTYRVVSVLTVLHQDWLNGKEYKCKVSNKALPAPIEKTI | hole, LALA, and M428L and |
| | SKAKGQPREPQVYTLPPSRDELTKNQVSLSCAVKGFYPSDIAVEWESFGTEWS | N434S mutations |
| | NYKTTPPVLDSDGSFFLVSKLTVSKEEWQQGFVFSCSVLHEALHSHYTQKSLS | |
| | LSPGK | |
| 432 | APEAAGGPSVFLFPPKPKDTLMISRTPEVTCVVVDVSHEDPEVKFNWYVDGVE | Clone CH3C.35.23.1.1 with |
| | VHNAKTKPREEQYNSTYRVVSVLTVLHQDWLNGKEYKCKVSNKALGAPIEKTI | hole, LALAPG, and M428L |
| | SKAKGQPREPQVYTLPPSRDELTKNQVSLSCAVKGFYPSDIAVEWESFGTEWS | and N434S mutations |
| | NYKTTPPVLDSDGSFFLVSKLTVSKEEWQQGFVFSCSVLHEALHSHYTQKSLS | |
| | LSPGK | |
| 433 | APELLGGPSVFLFPPKPKDTLMISRTPEVTCVVVDVSHEDPEVKFNWYVDGVE | Clone CH3C.35.23.2 with |
| | VHNAKTKPREEQYNSTYRVVSVLTVLHQDWLNGKEYKCKVSNKALPAPIEKTI | M428L and N434S mutations |
| | SKAKGQPREPQVYTLPPSRDELTKNQVSLTCLVKGFYPSDIAVEWESYGTEWA | |
| | NYKTTPPVLDSDGSFFLYSKLTVTKEEWQQGFVFSCSVLHEALHSHYTQKSLS | |
| | LSPGK | |
| 434 | APELLGGPSVFLFPPKPKDTLMISRTPEVTCVVVDVSHEDPEVKFNWYVDGVE | Clone CH3C.35.23.2 with |
| | VHNAKTKPREEQYNSTYRVVSVLTVLHQDWLNGKEYKCKVSNKALPAPIEKTI | knob and M428L and N434S |
| | SKAKGQPREPQVYTLPPSRDELTKNQVSLWCLVKGFYPSDIAVEWESYGTEWA | mutations |
| | NYKTTPPVLDSDGSFFLYSKLTVTKEEWQQGFVFSCSVLHEALHSHYTQKSLS | |
| | LSPGK | |
| 435 | APEAAGGPSVFLFPPKPKDTLMISRTPEVTCVVVDVSHEDPEVKFNWYVDGVE | Clone CH3C.35.23.2 with |
| | VHNAKTKPREEQYNSTYRVVSVLTVLHQDWLNGKEYKCKVSNKALPAPIEKTI | knob, LALA, and M428L and |
| | SKAKGQPREPQVYTLPPSRDELTKNQVSLWCLVKGFYPSDIAVEWESYGTEWA | N434S mutations |
| | NYKTTPPVLDSDGSFFLYSKLTVTKEEWQQGFVFSCSVLHEALHSHYTQKSLS | |
| | LSPGK | |
| 436 | APEAAGGPSVFLFPPKPKDTLMISRTPEVTCVVVDVSHEDPEVKFNWYVDGVE | Clone CH3C.35.23.2 with |
| | VHNAKTKPREEQYNSTYRVVSVLTVLHQDWLNGKEYKCKVSNKALGAPIEKTI | knob, LALAPG, and M428L |
| | SKAKGQPREPQVYTLPPSRDELTKNQVSLWCLVKGFYPSDIAVEWESYGTEWA | and N434S mutations |
| | NYKTTPPVLDSDGSFFLYSKLTVTKEEWQQGFVFSCSVLHEALHSHYTQKSLS | |
| | LSPGK | |
| 437 | APELLGGPSVFLFPPKPKDTLMISRTPEVTCVVVDVSHEDPEVKFNWYVDGVE | Clone CH3C.35.23.2 with |
| | VHNAKTKPREEQYNSTYRVVSVLTVLHQDWLNGKEYKCKVSNKALPAPIEKTI | hole and M428L and N434S |
| | SKAKGQPREPQVYTLPPSRDELTKNQVSLSCAVKGFYPSDIAVEWESYGTEWA | mutations |
| | NYKTTPPVLDSDGSFFLVSKLTVTKEEWQQGFVFSCSVLHEALHSHYTQKSLS | |
| | LSPGK | |
| 438 | APEAAGGPSVFLFPPKPKDTLMISRTPEVTCVVVDVSHEDPEVKFNWYVDGVE | Clone CH3C.35.23.2 with |
| | VHNAKTKPREEQYNSTYRVVSVLTVLHQDWLNGKEYKCKVSNKALPAPIEKTI | hole, LALA, and M428L and |
| | SKAKGQPREPQVYTLPPSRDELTKNQVSLSCAVKGFYPSDIAVEWESYGTEWA | N434S mutations |
| | NYKTTPPVLDSDGSFFLVSKLTVTKEEWQQGFVFSCSVLHEALHSHYTQKSLS | |
| | LSPGK | |
| 439 | APEAAGGPSVFLFPPKPKDTLMISRTPEVTCVVVDVSHEDPEVKFNWYVDGVE | Clone CH3C.35.23.2 with |
| | VHNAKTKPREEQYNSTYRVVSVLTVLHQDWLNGKEYKCKVSNKALGAPIEKTI | hole, LALAPG, and M428L |
| | SKAKGQPREPQVYTLPPSRDELTKNQVSLSCAVKGFYPSDIAVEWESYGTEWA | and N434S mutations |
| | NYKTTPPVLDSDGSFFLVSKLTVTKEEWQQGFVFSCSVLHEALHSHYTQKSLS | |
| | LSPGK | |
| 440 | APELLGGPSVFLFPPKPKDTLMISRTPEVTCVVVDVSHEDPEVKFNWYVDGVE | Clone CH3C.35.23.2.1 with |
| | VHNAKTKPREEQYNSTYRVVSVLTVLHQDWLNGKEYKCKVSNKALPAPIEKTI | M428L and N434S mutations |
| | SKAKGQPREPQVYTLPPSRDELTKNQVSLTCLVKGFYPSDIAVEWESYGTEWA | |
| | NYKTTPPVLDSDGSFFLYSKLTVSKSEWQQGFVFSCSVLHEALHSHYTQKSLS | |
| | LSPGK | |
| 441 | APELLGGPSVFLFPPKPKDTLMISRTPEVTCVVVDVSHEDPEVKFNWYVDGVE | Clone CH3C.35.23.2.1 with |
| | VHNAKTKPREEQYNSTYRVVSVLTVLHQDWLNGKEYKCKVSNKALPAPIEKTI | knob and M428L and N434S |
| | SKAKGQPREPQVYTLPPSRDELTKNQVSLWCLVKGFYPSDIAVEWESYGTEWA | mutations |
| | NYKTTPPVLDSDGSFFLYSKLTVSKSEWQQGFVFSCSVLHEALHSHYTQKSLS | |
| | LSPGK | |
| 442 | APEAAGGPSVFLFPPKPKDTLMISRTPEVTCVVVDVSHEDPEVKFNWYVDGVE | Clone CH3C.35.23.2.1 with |
| | VHNAKTKPREEQYNSTYRVVSVLTVLHQDWLNGKEYKCKVSNKALPAPIEKTI | knob, LALA, and M428L and |
| | SKAKGQPREPQVYTLPPSRDELTKNQVSLWCLVKGFYPSDIAVEWESYGTEWA | N434S mutations |
| | NYKTTPPVLDSDGSFFLYSKLTVSKSEWQQGFVFSCSVLHEALHSHYTQKSLS | |
| | LSPGK | |
| 443 | APEAAGGPSVFLFPPKPKDTLMISRTPEVTCVVVDVSHEDPEVKFNWYVDGVE | Clone CH3C.35.23.2.1 with |
| | VHNAKTKPREEQYNSTYRVVSVLTVLHQDWLNGKEYKCKVSNKALGAPIEKTI | knob, LALAPG, and M428L |
| | SKAKGQPREPQVYTLPPSRDELTKNQVSLWCLVKGFYPSDIAVEWESYGTEWA | and N434S mutations |
| | NYKTTPPVLDSDGSFFLYSKLTVSKSEWQQGFVFSCSVLHEALHSHYTQKSLS | |
| | LSPGK | |
| 444 | APELLGGPSVFLFPPKPKDTLMISRTPEVTCVVVDVSHEDPEVKFNWYVDGVE | Clone CH3C.35.23.2.1 with |
| | VHNAKTKPREEQYNSTYRVVSVLTVLHQDWLNGKEYKCKVSNKALPAPIEKTI | hole and M428L and N434S |
| | SKAKGQPREPQVYTLPPSRDELTKNQVSLSCAVKGFYPSDIAVEWESYGTEWA | mutations |
| | NYKTTPPVLDSDGSFFLVSKLTVSKSEWQQGFVFSCSVLHEALHSHYTQKSLS | |
| | LSPGK | |
| 445 | APEAAGGPSVFLFPPKPKDTLMISRTPEVTCVVVDVSHEDPEVKFNWYVDGVE | Clone CH3C.35.23.2.1 with |
| | VHNAKTKPREEQYNSTYRVVSVLTVLHQDWLNGKEYKCKVSNKALPAPIEKTI | hole, LALA, and M428L and |
| | SKAKGQPREPQVYTLPPSRDELTKNQVSLSCAVKGFYPSDIAVEWESYGTEWA | N434S mutations |
| | NYKTTPPVLDSDGSFFLVSKLTVSKSEWQQGFVFSCSVLHEALHSHYTQKSLS | |
| | LSPGK | |
| 446 | APEAAGGPSVFLFPPKPKDTLMISRTPEVTCVVVDVSHEDPEVKFNWYVDGVE | Clone CH3C.35.23.2.1 with |
| | VHNAKTKPREEQYNSTYRVVSVLTVLHQDWLNGKEYKCKVSNKALGAPIEKTI | hole, LALAPG, and M428L |
| | SKAKGQPREPQVYTLPPSRDELTKNQVSLSCAVKGFYPSDIAVEWESYGTEWA | and N434S mutations |
| | NYKTTPPVLDSDGSFFLVSKLTVSKSEWQQGFVFSCSVLHEALHSHYTQKSLS | |
| | LSPGK | |
| 447 | APELLGGPSVFLFPPKPKDTLMISRTPEVTCVVVDVSHEDPEVKFNWYVDGVE | Clone CH3C.35.23.3 with |
| | VHNAKTKPREEQYNSTYRVVSVLTVLHQDWLNGKEYKCKVSNKALPAPIEKTI | M428L and N434S mutations |
| | SKAKGQPREPQVYTLPPSRDELTKNQVSLTCLVKGFYPSDIAVEWESYGTEWV | |
| | NYKTTPPVLDSDGSFFLYSKLTVTKEEWQQGFVFSCSVLHEALHSHYTQKSLS | |
| | LSPGK | |
| 448 | APELLGGPSVFLFPPKPKDTLMISRTPEVTCVVVDVSHEDPEVKFNWYVDGVE | Clone CH3C.35.23.3 with |
| | VHNAKTKPREEQYNSTYRVVSVLTVLHQDWLNGKEYKCKVSNKALPAPIEKTI | knob and M428L and N434S |
| | SKAKGQPREPQVYTLPPSRDELTKNQVSLWCLVKGFYPSDIAVEWESYGTEWV | mutations |
| | NYKTTPPVLDSDGSFFLYSKLTVTKEEWQQGFVFSCSVLHEALHSHYTQKSLS | |
| | LSPGK | |
| 449 | APEAAGGPSVFLFPPKPKDTLMISRTPEVTCVVVDVSHEDPEVKFNWYVDGVE | Clone CH3C.35.23.3 with |
| | VHNAKTKPREEQYNSTYRVVSVLTVLHQDWLNGKEYKCKVSNKALPAPIEKTI | knob, LALA, and M428L and |
| | SKAKGQPREPQVYTLPPSRDELTKNQVSLWCLVKGFYPSDIAVEWESYGTEWV | N434S mutations |
| | NYKTTPPVLDSDGSFFLYSKLTVTKEEWQQGFVFSCSVLHEALHSHYTQKSLS | |
| | LSPGK | |
| 450 | APEAAGGPSVFLFPPKPKDTLMISRTPEVTCVVVDVSHEDPEVKFNWYVDGVE | Clone CH3C.35.23.3 with |
| | VHNAKTKPREEQYNSTYRVVSVLTVLHQDWLNGKEYKCKVSNKALGAPIEKTI | knob, LALAPG, and M428L |
| | SKAKGQPREPQVYTLPPSRDELTKNQVSLWCLVKGFYPSDIAVEWESYGTEWV | and N434S mutations |
| | NYKTTPPVLDSDGSFFLYSKLTVTKEEWQQGFVFSCSVLHEALHSHYTQKSLS | |
| | LSPGK | |
| 451 | APELLGGPSVFLFPPKPKDTLMISRTPEVTCVVVDVSHEDPEVKFNWYVDGVE | Clone CH3C.35.23.3 with |
| | VHNAKTKPREEQYNSTYRVVSVLTVLHQDWLNGKEYKCKVSNKALPAPIEKTI | hole and M428L and N434S |
| | SKAKGQPREPQVYTLPPSRDELTKNQVSLSCAVKGFYPSDIAVEWESYGTEWV | mutations |
| | NYKTTPPVLDSDGSFFLVSKLTVTKEEWQQGFVFSCSVLHEALHSHYTQKSLS | |
| | LSPGK | |
| 452 | APEAAGGPSVFLFPPKPKDTLMISRTPEVTCVVVDVSHEDPEVKFNWYVDGVE | Clone CH3C.35.23.3 with |
| | VHNAKTKPREEQYNSTYRVVSVLTVLHQDWLNGKEYKCKVSNKALPAPIEKTI | hole, LALA, and M428L and |
| | SKAKGQPREPQVYTLPPSRDELTKNQVSLSCAVKGFYPSDIAVEWESYGTEWV | N434S mutations |
| | NYKTTPPVLDSDGSFFLVSKLTVTKEEWQQGFVFSCSVLHEALHSHYTQKSLS | |
| | LSPGK | |
| 453 | APEAAGGPSVFLFPPKPKDTLMISRTPEVTCVVVDVSHEDPEVKFNWYVDGVE | Clone CH3C.35.23.3 with |
| | VHNAKTKPREEQYNSTYRVVSVLTVLHQDWLNGKEYKCKVSNKALGAPIEKTI | hole, LALAPG, and M428L |
| | SKAKGQPREPQVYTLPPSRDELTKNQVSLSCAVKGFYPSDIAVEWESYGTEWV | and N434S mutations |
| | NYKTTPPVLDSDGSFFLVSKLTVTKEEWQQGFVFSCSVLHEALHSHYTQKSLS | |
| | LSPGK | |
| 454 | APELLGGPSVFLFPPKPKDTLMISRTPEVTCVVVDVSHEDPEVKFNWYVDGVE | Clone CH3C.35.23.4 with |
| | VHNAKTKPREEQYNSTYRVVSVLTVLHQDWLNGKEYKCKVSNKALPAPIEKTI | M428L and N434S mutations |
| | SKAKGQPREPQVYTLPPSRDELTKNQVSLTCLVKGFYPSDIAVEWESYGTEWS | |
| | NYKTTPPVLDSDGSFFLYSKLTVSKEEWQQGFVFSCSVLHEALHSHYTQKSLS | |
| | LSPGK | |
| 455 | APELLGGPSVFLFPPKPKDTLMISRTPEVTCVVVDVSHEDPEVKFNWYVDGVE | Clone CH3C.35.23.4 with |
| | VHNAKTKPREEQYNSTYRVVSVLTVLHQDWLNGKEYKCKVSNKALPAPIEKTI | knob and M428L and N434S |
| | SKAKGQPREPQVYTLPPSRDELTKNQVSLWCLVKGFYPSDIAVEWESYGTEWS | mutations |
| | NYKTTPPVLDSDGSFFLYSKLTVSKEEWQQGFVFSCSVLHEALHSHYTQKSLS | |
| | LSPGK | |
| 456 | APEAAGGPSVFLFPPKPKDTLMISRTPEVTCVVVDVSHEDPEVKFNWYVDGVE | Clone CH3C.35.23.4 with |
| | VHNAKTKPREEQYNSTYRVVSVLTVLHQDWLNGKEYKCKVSNKALPAPIEKTI | knob, LALA, and M428L and |
| | SKAKGQPREPQVYTLPPSRDELTKNQVSLWCLVKGFYPSDIAVEWESYGTEWS | N434S mutations |
| | NYKTTPPVLDSDGSFFLYSKLTVSKEEWQQGFVFSCSVLHEALHSHYTQKSLS | |
| | LSPGK | |
| 457 | APEAAGGPSVFLFPPKPKDTLMISRTPEVTCVVVDVSHEDPEVKFNWYVDGVE | Clone CH3C.35.23.4 with |
| | VHNAKTKPREEQYNSTYRVVSVLTVLHQDWLNGKEYKCKVSNKALGAPIEKTI | knob, LALAPG, and M428L |
| | SKAKGQPREPQVYTLPPSRDELTKNQVSLWCLVKGFYPSDIAVEWESYGTEWS | and N434S mutations |
| | NYKTTPPVLDSDGSFFLYSKLTVSKEEWQQGFVFSCSVLHEALHSHYTQKSLS | |
| | LSPGK | |
| 458 | APELLGGPSVFLFPPKPKDTLMISRTPEVTCVVVDVSHEDPEVKFNWYVDGVE | Clone CH3C.35.23.4 with |
| | VHNAKTKPREEQYNSTYRVVSVLTVLHQDWLNGKEYKCKVSNKALPAPIEKTI | hole and M428L and N434S |
| | SKAKGQPREPQVYTLPPSRDELTKNQVSLSCAVKGFYPSDIAVEWESYGTEWS | mutations |
| | NYKTTPPVLDSDGSFFLVSKLTVSKEEWQQGFVFSCSVLHEALHSHYTQKSLS | |
| | LSPGK | |
| 459 | APEAAGGPSVFLFPPKPKDTLMISRTPEVTCVVVDVSHEDPEVKFNWYVDGVE | Clone CH3C.35.23.4 with |
| | VHNAKTKPREEQYNSTYRVVSVLTVLHQDWLNGKEYKCKVSNKALPAPIEKTI | hole, LALA, and M428L and |
| | SKAKGQPREPQVYTLPPSRDELTKNQVSLSCAVKGFYPSDIAVEWESYGTEWS | N434S mutations |
| | NYKTTPPVLDSDGSFFLVSKLTVSKEEWQQGFVFSCSVLHEALHSHYTQKSLS | |
| | LSPGK | |
| 460 | APEAAGGPSVFLFPPKPKDTLMISRTPEVTCVVVDVSHEDPEVKFNWYVDGVE | Clone CH3C.35.23.4 with |
| | VHNAKTKPREEQYNSTYRVVSVLTVLHQDWLNGKEYKCKVSNKALGAPIEKTI | hole, LALAPG, and M428L |
| | SKAKGQPREPQVYTLPPSRDELTKNQVSLSCAVKGFYPSDIAVEWESYGTEWS | and N434S mutations |
| | NYKTTPPVLDSDGSFFLVSKLTVSKEEWQQGFVFSCSVLHEALHSHYTQKSLS | |
| | LSPGK | |
| 461 | APELLGGPSVFLFPPKPKDTLMISRTPEVTCVVVDVSHEDPEVKFNWYVDGVE | Fc sequence with hole and |
| | VHNAKTKPREEQYNSTYRVVSVLTVLHQDWLNGKEYKCKVSNKALPAPIEKTI | M428L and N434S mutations |
| | SKAKGQPREPQVYTLPPSRDELTKNQVSLSCAVKGFYPSDIAVEWESNGQPEN | |
| | NYKTTPPVLDSDGSFFLVSKLTVDKSRWQQGNVFSCSVLHEALHSHYTQKSLS | |
| | LSPGK | |
| 462 | APEAAGGPSVFLFPPKPKDTLMISRTPEVTCVVVDVSHEDPEVKFNWYVDGVE | Fc sequence with hole, |
| | VHNAKTKPREEQYNSTYRVVSVLTVLHQDWLNGKEYKCKVSNKALPAPIEKTI | LALA, and M428L and |
| | SKAKGQPREPQVYTLPPSRDELTKNQVSLSCAVKGFYPSDIAVEWESNGQPEN | N434S mutations |
| | NYKTTPPVLDSDGSFFLVSKLTVDKSRWQQGNVFSCSVLHEALHSHYTQKSLS | |
| | LSPGK | |
| 463 | APELLGGPSVFLFPPKPKDTLMISRTPEVTCVVVDVSHEDPEVKFNWYVDGVE | Fc sequence with knob and |
| | VHNAKTKPREEQYNSTYRVVSVLTVLHQDWLNGKEYKCKVSNKALPAPIEKTI | M428L and N434S mutations |
| | SKAKGQPREPQVYTLPPSRDELTKNQVSLWCLVKGFYPSDIAVEWESNGQPEN | |
| | NYKTTPPVLDSDGSFFLYSKLTVDKSRWQQGNVFSCSVLHEALHSHYTQKSLS | |
| | LSPGK | |
| 464 | APEAAGGPSVFLFPPKPKDTLMISRTPEVTCVVVDVSHEDPEVKFNWYVDGVE | Fc sequence with knob, |
| | VHNAKTKPREEQYNSTYRVVSVLTVLHQDWLNGKEYKCKVSNKALPAPIEKTI | LALA, and M428L and |
| | SKAKGQPREPQVYTLPPSRDELTKNQVSLWCLVKGFYPSDIAVEWESNGQPEN | N434S mutations |
| | NYKTTPPVLDSDGSFFLYSKLTVDKSRWQQGNVFSCSVLHEALHSHYTQKSLS | |
| | LSPGK | |
| 465 | MPALLSLVSLLSVLLMGCVAETGGSGHHHHHHSGTHNTTVFQGVAGQSLQVSC | SS2_NHis_TREM2 |
| | PYDSMKHWGRRKAWCRQLGEKGPCQRVVSTHNLWLLSFLRRWNGSTAITDDTL | |
| | GGTLTITLRNLQPHDAGLYQCQSLHGSEADTLRKVLVEVLADPLDHRDAGDLW | |
| | FPGESESFEDAHVEHSISRSLLEGEIPFPPTSAS | |

[0724] It is understood that the examples and embodiments described herein are for illustrative purposes only and that various modifications or changes in light thereof will be suggested to persons skilled in the art and are to be included within the spirit and purview of this application and scope of the appended claims.

The application's sequence listing, which the Patent Office published only in electronic form, follows.

SEQUENCE LISTING (465 sequences)

SEQ ID NO: 1 - DNA, 20 bp, Artificial Sequence
  Synthetic Construct
ggacagggatccagagttcc

SEQ ID NO: 2 - DNA, 20 bp, Artificial Sequence
  Synthetic Construct
agctgggaaggtgtgcacac

SEQ ID NO: 3 - DNA, 19 bp, Artificial Sequence
  Synthetic Construct
caggggccagtggatagac

SEQ ID NO: 4 - DNA, 20 bp, Artificial Sequence
  Synthetic Construct
gacattgatgtctttggggt

SEQ ID NO: 5 - DNA, 20 bp, Artificial Sequence
  Synthetic Construct
ttcactgccatcaatcttcc

SEQ ID NO: 6 - protein, 140 aa, Artificial Sequence
  Synthetic Construct
QVQLQQPGAELVKPGASVKLSCKASGYTFTSYWMHWVKQSPGRGLEWIGRSDPTTGGTNYNEKFKTKATLTVDKPSSTAYMQLSSLTSDDSAVYYCVRTSGTGDYWGQGTSLTVSSAKTTAPSVYPLAPVCGGTTGSSVT

SEQ ID NO: 7 - protein, 140 aa, Artificial Sequence
  Synthetic Construct
DVVMTQTPLSLPVSLGDQASISCRSSQSLVHNNGNTFLHWYLQKPGQSPKLLIYKVSNRFSGVPDRFSGSGSGTDFTLKISRVEAEDLGVYFCSQTTHVPPTFGGGTKLEIKRADAAPTVSIFPPSSEQLTSGGASVVCF

SEQ ID NO: 8 - protein, 7 aa, Artificial Sequence
  Synthetic Construct
GYTFTSY

SEQ ID NO: 9 - protein, 15 aa, Artificial Sequence
  Synthetic Construct
IGRSDPTTGGTNYNE

SEQ ID NO: 10 - protein, 9 aa, Artificial Sequence
  Synthetic Construct
VRTSGTGDY

SEQ ID NO: 11 - protein, 16 aa, Artificial Sequence
  Synthetic Construct
RSSQSLVHNNGNTFLH

SEQ ID NO: 12 - protein, 6 aa, Artificial Sequence
  Synthetic Construct
VSNRFS

SEQ ID NO: 13 - protein, 9 aa, Artificial Sequence
  Synthetic Construct
SQTTHVPPT

SEQ ID NO: 14 - protein, 122 aa, Artificial Sequence
  Synthetic Construct
QVQLQQSGAELARPGASVKLSCKASGYTFTSYWIQWVKQRPGQGLEWIGTIYPGDGDARYTQKFKGKATLTADKSSSTTYMQLNSLASEDSAVYYCARNGITTAGYYAMDYWGQGTSVTVSS

SEQ ID NO: 15 - protein, 119 aa, Artificial Sequence
  Synthetic Construct
QVQLQQSGADLLRPGVSVKISCKGSGYTFTDHAMHWVKQSHAESLEWIGVISTYSGDTGYNQKFKGKATMTVDKSSSTAYLELARLTSEDSAIYYCAREGHYDDAMDYWGQGTSVTVSS

SEQ ID NO: 16 - protein, 119 aa, Artificial Sequence
  Synthetic Construct
EVQLQQSGPELVKPGASVKMSCKASGYTFTSYVMHWVKQKPGQGLEWIGYINPYTDGTKYNEKFKGKATLTSDKSSSTAYMDLSSLTSEDSAVYYCARGEVRRYALDYWGQGTSVTVSS

SEQ ID NO: 17 - protein, 118 aa, Artificial Sequence
  Synthetic Construct
QVHLQQSGSELRSPGSSVKLSCKDFDSEVFPISYMSWIRQKPGHGFEWIGDILPSIGGRIYGVKFEDRATLDADTVSNTAYLELNSLTSEDSAIYYCARKDYGSLAYWGQGTLVTVSA

SEQ ID NO: 18 - protein, 122 aa, Artificial Sequence
  Synthetic Construct
EVQLQQSGPELVKPGASVKISCKTSGYTLSEYTMHWVIQSHGKSLEWIGGVIPNSGGTSYNQKFRDKASLTVDKSSSTAYLELRSLTSEDSAVYYCARGDDSYRRGYALDYWGQGTSVTVSS

SEQ ID NO: 19 - protein, 113 aa, Artificial Sequence
  Synthetic Construct
EVQLQQSGAEVVKPGASVKLSCTASGFNIKDTYMHWVKQRPEQGLEWIGRIDPANGNTKYDPKFQGKATITADTSSNTAYLQLSSLTSEDTAVYYCATLFAYWGQGTLVTVSA

SEQ ID NO: 20 - protein, 118 aa, Artificial Sequence
  Synthetic Construct
DVQLQESGPGLVKPSQSLSLTCTVTGYSITSDYAWNWIRQFPGNKLEWMGYINYSGRTIYNPSLKSRISITRDTSKNHFFLQLISVTTEDTATYYCARWNGNYGFAYWGQGTLVTVSA

SEQ ID NO: 21 - protein, 118 aa, Artificial Sequence
  Synthetic Construct
DVQLQESGPGLVKPSQSLSLTCTVTGYSITSDYAWNWIRQFPGNRLEWMGYISFSGSTSYNPSLKSRISITRDTSKNQFFLQLNSVTTEDTATYYCARWNGNYGFAYWGQGTLVTVSA

SEQ ID NO: 22 - protein, 118 aa, Artificial Sequence
  Synthetic Construct
QVHLQQSGSELRSPGSSVKLSCKDFDSEVFPIAYMSWVRQKPGHGFEWIGDILPSIGRRIYGVKFEDKATLDADTVSNTAYLELNSLTSEDSAIYYCTRKDYGSLAYWGQGTLVTVSA

SEQ ID NO: 23 - protein, 114 aa, Artificial Sequence
  Synthetic Construct
QVQLKESGPGLVAPSQSLSITCTVSGFSLSRYSVYWVRQPPGKGLEWLGMIWGGGNTDYNSALKSRLSISKDNSKSQVFLKMNSLQTDDSAMYYCVQYGGMDYWGQGTSVTVSS

SEQ ID NO: 24 - protein, 116 aa, Artificial Sequence
  Synthetic Construct
QVQLQQPGAELVKPGASVKLSCKASGYTFTSYWMHWVKQSPGRGLEWIGRSDPTTGGTNYNEKFKTKATLTVDKPSSTAYMQLSSLTSDDSAVYYCVRTSGTGDYWGQGTSLTVSS

SEQ ID NO: 25 - protein, 107 aa, Artificial Sequence
  Synthetic Construct
DIQMTQSPASLSVSVGETVTITCRASENIYSNLAWYQQKQGRSPQLLVYAATNLADGVPSRFSGSGSGTQYSLKINSLQSEDFGYYYCQHFWGTPYTFGGGTKVEIK

SEQ ID NO: 26 - protein, 112 aa, Artificial Sequence
  Synthetic Construct
DVVMTQTPLTLSVTIGQPASFSCKSSQSLLDSDGKTYLNWLLRRPGQSPKRLIYVVSKLDSGVPDRFTGSGSGTDFTLKISRVEAEDLGVYYCWQGTHFPYTFGGGTKLEIK

SEQ ID NO: 27 - protein, 107 aa, Artificial Sequence
  Synthetic Construct
DIQMTQSSSSFSVSLGDRVTITCKASEDIYNRLAWYQQKPGNAPRLLISGATSLETGVPSRFSGSGSGKDYTLSITSLQTEDVATYYCQQYWSTPWTFGGGTKLEIK

SEQ ID NO: 28 - protein, 112 aa, Artificial Sequence
  Synthetic Construct
DVVMTQTPLSLPVSLGDQASISCRSSQSLVHINGNTYLQWFLQKPGQSPKLLIYKVSNRFSGVPDRFSGSGSGTAFTLKISRVEAEDLGVYFCSQSTHVPYTFGGGTKLEIK

SEQ ID NO: 29 - protein, 113 aa, Artificial Sequence
  Synthetic Construct
DIVMSQSPSSLAVSVGEKVTMSCKSSQSLLYSSNQKSYLAWYQQKPGQSPKLLIYWASTRESGVPDRFRGSGSGTDFTLTISSVKAEDLAVYYCQQYFSYPPTFGGGTKLEIK

SEQ ID NO: 30 - protein, 111 aa, Artificial Sequence
  Synthetic Construct
DIVMTQAAFSNPVTLGTSASISCRSSKSLLHSNGITYLYWYLQKPGQSPQLLIYQMSNLASGVPDRFSSSGSGIDFTLRINRVEAEDVGVYYCAQNLELPTFGSGTKLEIK

SEQ ID NO: 31 - protein, 112 aa, Artificial Sequence
  Synthetic Construct
DVVMTQNPLSLPVSLGDQASISCRSSQSLVHINGNTYLHWYLQKPGQSPKLLIYKVSNRFSGVPDRFSGSGSGTDFTLKISRVEAEDLGVYFCSQTTHALFTFGSGTKLEIK

SEQ ID NO: 32 - protein, 112 aa, Artificial Sequence
  Synthetic Construct
DVVMTQTPLSLPVSLGDQASISCRSSQSLVHINGNTYLHWYLQKPGQSPKLLIYKVSNRFSGVPDRFSGSGSGTDFTLKISRVEAEDLGVYFCSQSTHVTFTFGSGTKLEIK

SEQ ID NO: 33 - protein, 112 aa, Artificial Sequence
  Synthetic Construct
DVVMTQTPLSLPVSLGDQASISCRSSQSLVHINGNTYLQWYLQKPGQSPKLLIYKVSNRFSGVPDRFSGSGSGTDFTLRISRVEAEDLGVYFCSQSTHLPYTFGGGTKLEIK

SEQ ID NO: 34 - protein, 112 aa, Artificial Sequence
  Synthetic Construct
DVLMTQTPLSLPVSLGDQASISCRSSQSIVHSNGNTYLEWYLQKPGQSPKLLIYKVSNRFSGVPDRFSGSGSGTDFTLKISRVEAEDLGVYYCFQGSHVPYTFGGGTKLEIK

SEQ ID NO: 35 - protein, 112 aa, Artificial Sequence
  Synthetic Construct
DVVMTQTPLSLPVSLGDQASISCRSSQSLVHNNGNTFLHWYLQKPGQSPKLLIYKVSNRFSGVPDRFSGSGSGTDFTLKISRVEAEDLGVYFCSQTTHVPPTFGGGTKLEIK

SEQ ID NO: 36 - protein, 10 aa, Artificial Sequence
  Synthetic Construct
GYTFTSYWMH

SEQ ID NO: 37 - protein, 17 aa, Artificial Sequence
  Synthetic Construct
RSDPTTGGTNYNEKFKT

SEQ ID NO: 38 - protein, 7 aa, Artificial Sequence
  Synthetic Construct
KVSNRFS

SEQ ID NO: 39 - protein, 10 aa, Artificial Sequence
  Synthetic Construct
GYTFTSYWIQ

SEQ ID NO: 40 - protein, 17 aa, Artificial Sequence
  Synthetic Construct
TIYPGDGDARYTQKFKG

SEQ ID NO: 41 - protein, 15 aa, Artificial Sequence
  Synthetic Construct
ARNGITTAGYYAMDY

SEQ ID NO: 42 - protein, 11 aa, Artificial Sequence
  Synthetic Construct
RASENIYSNLA

SEQ ID NO: 43 - protein, 7 aa, Artificial Sequence
  Synthetic Construct
AATNLAD

SEQ ID NO: 44 - protein, 9 aa, Artificial Sequence
  Synthetic Construct
QHFWGTPYT

SEQ ID NO: 45 - protein, 10 aa, Artificial Sequence
  Synthetic Construct
GYTFTDHAMH

SEQ ID NO: 46 - protein, 17 aa, Artificial Sequence
  Synthetic Construct
VISTYSGDTGYNQKFKG

SEQ ID NO: 47 - protein, 12 aa, Artificial Sequence
  Synthetic Construct
AREGHYDDAMDY

SEQ ID NO: 48 - protein, 16 aa, Artificial Sequence
  Synthetic Construct
KSSQSLLDSDGKTYLN

SEQ ID NO: 49 - protein, 7 aa, Artificial Sequence
  Synthetic Construct
VVSKLDS

SEQ ID NO: 50 - protein, 9 aa, Artificial Sequence
  Synthetic Construct
WQGTHFPYT

SEQ ID NO: 51 - protein, 10 aa, Artificial Sequence
  Synthetic Construct
GYTFTSYVMH

SEQ ID NO: 52 - protein, 17 aa, Artificial Sequence
  Synthetic Construct
YINPYTDGTKYNEKFKG

SEQ ID NO: 53 - protein, 12 aa, Artificial Sequence
  Synthetic Construct
ARGEVRRYALDY

SEQ ID NO: 54 - protein, 11 aa, Artificial Sequence
  Synthetic Construct
KASEDIYNRLA

SEQ ID NO: 55 - protein, 7 aa, Artificial Sequence
  Synthetic Construct
GATSLET

SEQ ID NO: 56 - protein, 9 aa, Artificial Sequence
  Synthetic Construct
QQYWSTPWT

SEQ ID NO: 57 - protein, 11 aa, Artificial Sequence
  Synthetic Construct
DSEVFPISYMS

SEQ ID NO: 58 - protein, 15 aa, Artificial Sequence
  Synthetic Construct
DILPSIGGRIYGVKF

SEQ ID NO: 59 - protein, 10 aa, Artificial Sequence
  Synthetic Construct
ARKDYGSLAY

SEQ ID NO: 60 - protein, 16 aa, Artificial Sequence
  Synthetic Construct
RSSQSLVHINGNTYLQ

SEQ ID NO: 61 - protein, 9 aa, Artificial Sequence
  Synthetic Construct
SQSTHVPYT

SEQ ID NO: 62 - protein, 10 aa, Artificial Sequence
  Synthetic Construct
GYTLSEYTMH

SEQ ID NO: 63 - protein, 17 aa, Artificial Sequence
  Synthetic Construct
GVIPNSGGTSYNQKFRD

SEQ ID NO: 64 - protein, 15 aa, Artificial Sequence
  Synthetic Construct
ARGDDSYRRGYALDY

SEQ ID NO: 65 - protein, 17 aa, Artificial Sequence
  Synthetic Construct
KSSQSLLYSSNQKSYLA

SEQ ID NO: 66 - protein, 7 aa, Artificial Sequence
  Synthetic Construct
WASTRES

SEQ ID NO: 67 - protein, 9 aa, Artificial Sequence
  Synthetic Construct
QQYFSYPPT

SEQ ID NO: 68 - protein, 10 aa, Artificial Sequence
  Synthetic Construct
GFNIKDTYMH

SEQ ID NO: 69 - protein, 17 aa, Artificial Sequence
  Synthetic Construct
RIDPANGNTKYDPKFQG

SEQ ID NO: 70 - protein, 6 aa, Artificial Sequence
  Synthetic Construct
ATLFAY

SEQ ID NO: 71 - protein, 16 aa, Artificial Sequence
  Synthetic Construct
RSSKSLLHSNGITYLY

SEQ ID NO: 72 - protein, 7 aa, Artificial Sequence
  Synthetic Construct
QMSNLAS

SEQ ID NO: 73 - protein, 8 aa, Artificial Sequence
  Synthetic Construct
AQNLELPT

SEQ ID NO: 74 - protein, 11 aa, Artificial Sequence
  Synthetic Construct
GYSITSDYAWN

SEQ ID NO: 75 - protein, 16 aa, Artificial Sequence
  Synthetic Construct
YINYSGRTIYNPSLKS

SEQ ID NO: 76 - protein, 11 aa, Artificial Sequence
  Synthetic Construct
ARWNGNYGFAY

SEQ ID NO: 77 - protein, 16 aa, Artificial Sequence
  Synthetic Construct
RSSQSLVHINGNTYLH

SEQ ID NO: 78 - protein, 9 aa, Artificial Sequence
  Synthetic Construct
SQTTHALFT

SEQ ID NO: 79 - protein, 16 aa, Artificial Sequence
  Synthetic Construct
YISFSGSTSYNPSLKS

SEQ ID NO: 80 - protein, 9 aa, Artificial Sequence
  Synthetic Construct
SQSTHVTFT

SEQ ID NO: 81 - protein, 11 aa, Artificial Sequence
  Synthetic Construct
DSEVFPIAYMS

SEQ ID NO: 82 - protein, 17 aa, Artificial Sequence
  Synthetic Construct
DILPSIGRRIYGVKFED

SEQ ID NO: 83 - protein, 8 aa, Artificial Sequence
  Synthetic Construct
KDYGSLAY

SEQ ID NO: 84 - protein, 9 aa, Artificial Sequence
  Synthetic Construct
SQSTHLPYT

SEQ ID NO: 85 - protein, 10 aa, Artificial Sequence
  Synthetic Construct
GFSLSRYSVY

SEQ ID NO: 86 - protein, 16 aa, Artificial Sequence
  Synthetic Construct
MIWGGGNTDYNSALKS

SEQ ID NO: 87 - protein, 6 aa, Artificial Sequence
  Synthetic Construct
YGGMDY

SEQ ID NO: 88 - protein, 16 aa, Artificial Sequence
  Synthetic Construct
RSSQSIVHSNGNTYLE

SEQ ID NO: 89 - protein, 9 aa, Artificial Sequence
  Synthetic Construct
FQGSHVPYT

SEQ ID NO: 90 - protein, 223 aa, Artificial Sequence
  Synthetic Construct
QVQLQQPGAELVKPGASVKLSCKASGYTFTSYWMHWVKQSPGRGLEWIGRSDPTTGGTNYNEKFKTKATLTVDKPSSTAYMQLSSLTSDDSAVYYCVRTSGTGDYWGQGTSLTVSSASTKGPSVFPLAPSSKSTSGGTAALGCLVKDYFPEPVTVSWNSGALTSGVHTFPAVLQSSGLYSLSSVVTVPSSSLGTQTYICNVNHKPSNTKVDKKVEPKSCDKTH

SEQ ID NO: 91 - protein, 446 aa, Artificial Sequence
  Synthetic Construct
QVQLQQPGAELVKPGASVKLSCKASGYTFTSYWMHWVKQSPGRGLEWIGRSDPTTGGTNYNEKFKTKATLTVDKPSSTAYMQLSSLTSDDSAVYYCVRTSGTGDYWGQGTSLTVSSASTKGPSVFPLAPSSKSTSGGTAALGCLVKDYFPEPVTVSWNSGALTSGVHTFPAVLQSSGLYSLSSVVTVPSSSLGTQTYICNVNHKPSNTKVDKKVEPKSCDKTHTCPPCPAPEAAGGPSVFLFPPKPKDTLMISRTPEVTCVVVDVSHEDPEVKFNWYVDGVEVHNAKTKPREEQYNSTYRVVSVLTVLHQDWLNGKEYKCKVSNKALGAPIEKTISKAKGQPREPQVYTLPPSRDELTKNQVSLWCLVKGFYPSDIAVLWESYGTEWASYKTTPPVLDSDGSFFLYSKLTVTKEEWQQGFVFSCSVMHEALHNHYTQKSLSLSPGK

SEQ ID NO: 92 - protein, 446 aa, Artificial Sequence
  Synthetic Construct
QVQLQQPGAELVKPGASVKLSCKASGYTFTSYWMHWVKQSPGRGLEWIGRSDPTTGGTNYNEKFKTKATLTVDKPSSTAYMQLSSLTSDDSAVYYCVRTSGTGDYWGQGTSLTVSSASTKGPSVFPLAPSSKSTSGGTAALGCLVKDYFPEPVTVSWNSGALTSGVHTFPAVLQSSGLYSLSSVVTVPSSSLGTQTYICNVNHKPSNTKVDKKVEPKSCDKTHTCPPCPAPEAAGGPSVFLFPPKPKDTLMISRTPEVTCVVVDVSHEDPEVKFNWYVDGVEVHNAKTKPREEQYNSTYRVVSVLTVLHQDWLNGKEYKCKVSNKALGAPIEKTISKAKGQPREPQVYTLPPSRDELTKNQVSLSCAVKGFYPSDIAVEWESNGQPENNYKTTPPVLDSDGSFFLVSKLTVDKSRWQQGNVFSCSVMHEALHNHYTQKSLSLSPGK

SEQ ID NO: 93 - protein, 229 aa, Artificial Sequence
  Synthetic Construct
EVQLQQSGPELVKPGASVKISCKTSGYTLSEYTMHWVIQSHGKSLEWIGGVIPNSGGTSYNQKFRDKASLTVDKSSSTAYLELRSLTSEDSAVYYCARGDDSYRRGYALDYWGQGTSVTVSSASTKGPSVFPLAPSSKSTSGGTAALGCLVKDYFPEPVTVSWNSGALTSGVHTFPAVLQSSGLYSLSSVVTVPSSSLGTQTYICNVNHKPSNTKVDKKVEPKSCDKTH

SEQ ID NO: 94 - protein, 452 aa, Artificial Sequence
  Synthetic Construct
EVQLQQSGPELVKPGASVKISCKTSGYTLSEYTMHWVIQSHGKSLEWIGGVIPNSGGTSYNQKFRDKASLTVDKSSSTAYLELRSLTSEDSAVYYCARGDDSYRRGYALDYWGQGTSVTVSSASTKGPSVFPLAPSSKSTSGGTAALGCLVKDYFPEPVTVSWNSGALTSGVHTFPAVLQSSGLYSLSSVVTVPSSSLGTQTYICNVNHKPSNTKVDKKVEPKSCDKTHTCPPCPAPEAAGGPSVFLFPPKPKDTLMISRTPEVTCVVVDVSHEDPEVKFNWYVDGVEVHNAKTKPREEQYNSTYRVVSVLTVLHQDWLNGKEYKCKVSNKALGAPIEKTISKAKGQPREPQVYTLPPSRDELTKNQVSLWCLVKGFYPSDIAVLWESYGTEWASYKTTPPVLDSDGSFFLYSKLTVTKEEWQQGFVFSCSVMHEALHNHYTQKSLSLSPGK

SEQ ID NO: 95 - protein, 452 aa, Artificial Sequence
  Synthetic Construct
EVQLQQSGPELVKPGASVKISCKTSGYTLSEYTMHWVIQSHGKSLEWIGGVIPNSGGTSYNQKFRDKASLTVDKSSSTAYLELRSLTSEDSAVYYCARGDDSYRRGYALDYWGQGTSVTVSSASTKGPSVFPLAPSSKSTSGGTAALGCLVKDYFPEPVTVSWNSGALTSGVHTFPAVLQSSGLYSLSSVVTVPSSSLGTQTYICNVNHKPSNTKVDKKVEPKSCDKTHTCPPCPAPEAAGGPSVFLFPPKPKDTLMISRTPEVTCVVVDVSHEDPEVKFNWYVDGVEVHNAKTKPREEQYNSTYRVVSVLTVLHQDWLNGKEYKCKVSNKALGAPIEKTISKAKGQPREPQVYTLPPSRDELTKNQVSLSCAVKGFYPSDIAVEWESNGQPENNYKTTPPVLDSDGSFFLVSKLTVDKSRWQQGNVFSCSVMHEALHNHYTQKSLSLSPGK

SEQ ID NO: 96 - protein, 230 aa, Homo sapiens
MEPLRLLILLFVTELSGAHNTTVFQGVAGQSLQVSCPYDSMKHWGRRKAWCRQLGEKGPCQRVVSTHNLWLLSFLRRWNGSTAITDDTLGGTLTITLRNLQPHDAGLYQCQSLHGSEADTLRKVLVEVLADPLDHRDAGDLWFPGESESFEDAHVEHSISRSLLEGEIPFPPTSILLLLACIFLIKILAASALWAAAWHGQKPGTHPPSELDCGHDPGYQLQTLPGLRDT

SEQ ID NO: 97 - protein, 760 aa, Homo sapiens
MMDQARSAFSNLFGGEPLSYTRFSLARQVDGDNSHVEMKLAVDEEENADNNTKANVTKPKRCSGSICYGTIAVIVFFLIGFMIGYLGYCKGVEPKTECERLAGTESPVREEPGEDFPAARRLYWDDLKRKLSEKLDSTDFTGTIKLLNENSYVPREAGSQKDENLALYVENQFREFKLSKVWRDQHFVKIQVKDSAQNSVIIVDKNGRLVYLVENPGGYVAYSKAATVTGKLVHANFGTKKDFEDLYTPVNGSIVIVRAGKITFAEKVANAESLNAIGVLIYMDQTKFPIVNAELSFFGHAHLGTGDPYTPGFPSFNHTQFPPSRSSGLPNIPVQTISRAAAEKLFGNMEGDCPSDWKTDSTCRMVTSESKNVKLTVSNVLKEIKILNIFGVIKGFVEPDHYVVVGAQRDAWGPGAAKSGVGTALLLKLAQMFSDMVLKDGFQPSRSIIFASWSAGDFGSVGATEWLEGYLSSLHLKAFTYINLDKAVLGTSNFKVSASPLLYTLIEKTMQNVKHPVTGQFLYQDSNWASKVEKLTLDNAAFPFLAYSGIPAVSFCFCEDTDYPYLGTTMDTYKELIERIPELNKVARAAAEVAGQFVIKLTHDVELNLDYERYNSQLLSFVRDLNQYRADIKEMGLSLQWLYSARGDFFRATSRLTTDFGNAEKTDRFVMKKLNDRVMRVEYHFLSPYVSPKESPFRHVFWGSGSHTLPALLENLKLRKQNNGAFNETLFRNQLALATWTIQGAANALSGDVWDIDNEF

SEQ ID NO: 98 - protein, 217 aa, Homo sapiens
APELLGGPSVFLFPPKPKDTLMISRTPEVTCVVVDVSHEDPEVKFNWYVDGVEVHNAKTKPREEQYNSTYRVVSVLTVLHQDWLNGKEYKCKVSNKALPAPIEKTISKAKGQPREPQVYTLPPSRDELTKNQVSLTCLVKGFYPSDIAVEWESNGQPENNYKTTPPVLDSDGSFFLYSKLTVDKSRWQQGNVFSCSVMHEALHNHYTQKSLSLSPGK

SEQ ID NO: 99 - protein, 15 aa, Homo sapiens
EPKSCDKTHTCPPCP

SEQ ID NO: 100 - protein, 217 aa, Artificial Sequence
  Synthetic Construct
APELLGGPSVFLFPPKPKDTLMISRTPEVTCVVVDVSHEDPEVKFNWYVDGVEVHNAKTKPREEQYNSTYRVVSVLTVLHQDWLNGKEYKCKVSNKALPAPIEKTISKAKGQPREPQVYTLPPSRDELTKNQVSLTCLVKGFYPSDIAVEWESYGTEWSSYKTTPPVLDSDGSFFLYSKLTVTKEEWQQGFVFSCSVMHEALHNHYTQKSLSLSPGK

SEQ ID NO: 101 - protein, 217 aa, Artificial Sequence
  Synthetic Construct
APELLGGPSVFLFPPKPKDTLMISRTPEVTCVVVDVSHEDPEVKFNWYVDGVEVHNAKTKPREEQYNSTYRVVSVLTVLHQDWLNGKEYKCKVSNKALPAPIEKTISKAKGQPREPQVYTLPPSRDELTKNQVSLTCLVKGFYPSDIAVWWESYGTEWSSYKTTPPVLDSDGSFFLYSKLTVTKEEWQQGFVFSCSVMHEALHNHYTQKSLSLSPGK

SEQ ID NO: 102 - protein, 217 aa, Artificial Sequence
  Synthetic Construct
APELLGGPSVFLFPPKPKDTLMISRTPEVTCVVVDVSHEDPEVKFNWYVDGVEVHNAKTKPREEQYNSTYRVVSVLTVLHQDWLNGKEYKCKVSNKALPAPIEKTISKAKGQPREPQVYTLPPSRDELTKNQVSLTCLVKGFYPSDIAVWWESYGTEWSNYKTTPPVLDSDGSFFLYSKLTVTKSEWQQGFVFSCSVMHEALHNHYTQKSLSLSPGK

SEQ ID NO: 103 - protein, 217 aa, Artificial Sequence
  Synthetic Construct
APELLGGPSVFLFPPKPKDTLMISRTPEVTCVVVDVSHEDPEVKFNWYVDGVEVHNAKTKPREEQYNSTYRVVSVLTVLHQDWLNGKEYKCKVSNKALPAPIEKTISKAKGQPREPQVYTLPPSRDELTKNQVSLTCLVKGFYPSDIAVEWESYGTEWSNYKTTPPVLDSDGSFFLYSKLTVTKEEWQQGFVFSCSVMHEALHNHYTQKSLSLSPGK

SEQ ID NO: 104 - protein, 217 aa, Artificial Sequence
  Synthetic Construct
APELLGGPSVFLFPPKPKDTLMISRTPEVTCVVVDVSHEDPEVKFNWYVDGVEVHNAKTKPREEQYNSTYRVVSVLTVLHQDWLNGKEYKCKVSNKALPAPIEKTISKAKGQPREPQVYTLPPSRDELTKNQVSLTCLVKGFYPSDIAVWWESYGTEWSNYKTTPPVLDSDGSFFLYSKLTVTKEEWQQGFVFSCSVMHEALHNHYTQKSLSLSPGK

SEQ ID NO: 105 - protein, 217 aa, Artificial Sequence
  Synthetic Construct
APELLGGPSVFLFPPKPKDTLMISRTPEVTCVVVDVSHEDPEVKFNWYVDGVEVHNAKTKPREEQYNSTYRVVSVLTVLHQDWLNGKEYKCKVSNKALPAPIEKTISKAKGQPREPQVYTLPPSRDELTKNQVSLTCLVKGFYPSDIAVLWESYGTEWSSYKTTPPVLDSDGSFFLYSKLTVTKEEWQQGFVFSCSVMHEALHNHYTQKSLSLSPGK

SEQ ID NO: 106 - protein, 217 aa, Artificial Sequence
  Synthetic Construct
APELLGGPSVFLFPPKPKDTLMISRTPEVTCVVVDVSHEDPEVKFNWYVDGVEVHNAKTKPREEQYNSTYRVVSVLTVLHQDWLNGKEYKCKVSNKALPAPIEKTISKAKGQPREPQVYTLPPSRDELTKNQVSLTCLVKGFYPSDIAVEWESFGTEWSSYKTTPPVLDSDGSFFLYSKLTVTKEEWQQGFVFSCSVMHEALHNHYTQKSLSLSPGK

SEQ ID NO: 107 - protein, 217 aa, Artificial Sequence
  Synthetic Construct
APELLGGPSVFLFPPKPKDTLMISRTPEVTCVVVDVSHEDPEVKFNWYVDGVEVHNAKTKPREEQYNSTYRVVSVLTVLHQDWLNGKEYKCKVSNKALPAPIEKTISKAKGQPREPQVYTLPPSRDELTKNQVSLTCLVKGFYPSDIAVEWESYGTEWASYKTTPPVLDSDGSFFLYSKLTVTKEEWQQGFVFSCSVMHEALHNHYTQKSLSLSPGK

SEQ ID NO: 108 - protein, 217 aa, Artificial Sequence
  Synthetic Construct
APELLGGPSVFLFPPKPKDTLMISRTPEVTCVVVDVSHEDPEVKFNWYVDGVEVHNAKTKPREEQYNSTYRVVSVLTVLHQDWLNGKEYKCKVSNKALPAPIEKTISKAKGQPREPQVYTLPPSRDELTKNQVSLTCLVKGFYPSDIAVEWESYGTEWVSYKTTPPVLDSDGSFFLYSKLTVTKEEWQQGFVFSCSVMHEALHNHYTQKSLSLSPGK

SEQ ID NO: 109 - protein, 217 aa, Artificial Sequence
  Synthetic Construct
APELLGGPSVFLFPPKPKDTLMISRTPEVTCVVVDVSHEDPEVKFNWYVDGVEVHNAKTKPREEQYNSTYRVVSVLTVLHQDWLNGKEYKCKVSNKALPAPIEKTISKAKGQPREPQVYTLPPSRDELTKNQVSLTCLVKGFYPSDIAVEWESYGTEWSSYKTTPPVLDSDGSFFLYSKLTVSKEEWQQGFVFSCSVMHEALHNHYTQKSLSLSPGK

SEQ ID NO: 110 - protein, 217 aa, Artificial Sequence
  Synthetic Construct
APELLGGPSVFLFPPKPKDTLMISRTPEVTCVVVDVSHEDPEVKFNWYVDGVEVHNAKTKPREEQYNSTYRVVSVLTVLHQDWLNGKEYKCKVSNKALPAPIEKTISKAKGQPREPQVYTLPPSRDELTKNQVSLTCLVKGFYPSDIAVEWESFGTEWASYKTTPPVLDSDGSFFLYSKLTVTKEEWQQGFVFSCSVMHEALHNHYTQKSLSLSPGK

SEQ ID NO: 111 - protein, 217 aa, Artificial Sequence
  Synthetic Construct
APELLGGPSVFLFPPKPKDTLMISRTPEVTCVVVDVSHEDPEVKFNWYVDGVEVHNAKTKPREEQYNSTYRVVSVLTVLHQDWLNGKEYKCKVSNKALPAPIEKTISKAKGQPREPQVYTLPPSRDELTKNQVSLTCLVKGFYPSDIAVEWESFGTEWVSYKTTPPVLDSDGSFFLYSKLTVTKEEWQQGFVFSCSVMHEALHNHYTQKSLSLSPGK

SEQ ID NO: 112 - protein, 217 aa, Artificial Sequence
  Synthetic Construct
APELLGGPSVFLFPPKPKDTLMISRTPEVTCVVVDVSHEDPEVKFNWYVDGVEVHNAKTKPREEQYNSTYRVVSVLTVLHQDWLNGKEYKCKVSNKALPAPIEKTISKAKGQPREPQVYTLPPSRDELTKNQVSLTCLVKGFYPSDIAVWWESFGTEWSSYKTTPPVLDSDGSFFLYSKLTVTKEEWQQGFVFSCSVMHEALHNHYTQKSLSLSPGK

SEQ ID NO: 113 - protein, 217 aa, Artificial Sequence
  Synthetic Construct
APELLGGPSVFLFPPKPKDTLMISRTPEVTCVVVDVSHEDPEVKFNWYVDGVEVHNAKTKPREEQYNSTYRVVSVLTVLHQDWLNGKEYKCKVSNKALPAPIEKTISKAKGQPREPQVYTLPPSRDELTKNQVSLTCLVKGFYPSDIAVWWESYGTEWASYKTTPPVLDSDGSFFLYSKLTVTKEEWQQGFVFSCSVMHEALHNHYTQKSLSLSPGK

SEQ ID NO: 114 - protein, 217 aa, Artificial Sequence
  Synthetic Construct
APELLGGPSVFLFPPKPKDTLMISRTPEVTCVVVDVSHEDPEVKFNWYVDGVEVHNAKTKPREEQYNSTYRVVSVLTVLHQDWLNGKEYKCKVSNKALPAPIEKTISKAKGQPREPQVYTLPPSRDELTKNQVSLTCLVKGFYPSDIAVWWESYGTEWVSYKTTPPVLDSDGSFFLYSKLTVTKEEWQQGFVFSCSVMHEALHNHYTQKSLSLSPGK

SEQ ID NO: 115 - protein, 217 aa, Artificial Sequence
  Synthetic Construct
APELLGGPSVFLFPPKPKDTLMISRTPEVTCVVVDVSHEDPEVKFNWYVDGVEVHNAKTKPREEQYNSTYRVVSVLTVLHQDWLNGKEYKCKVSNKALPAPIEKTISKAKGQPREPQVYTLPPSRDELTKNQVSLTCLVKGFYPSDIAVWWESYGTEWSSYKTTPPVLDSDGSFFLYSKLTVSKEEWQQGFVFSCSVMHEALHNHYTQKSLSLSPGK

SEQ ID NO: 116 - protein, 217 aa, Artificial Sequence
  Synthetic Construct
APELLGGPSVFLFPPKPKDTLMISRTPEVTCVVVDVSHEDPEVKFNWYVDGVEVHNAKTKPREEQYNSTYRVVSVLTVLHQDWLNGKEYKCKVSNKALPAPIEKTISKAKGQPREPQVYTLPPSRDELTKNQVSLTCLVKGFYPSDIAVWWESFGTEWASYKTTPPVLDSDGSFFLYSKLTVTKEEWQQGFVFSCSVMHEALHNHYTQKSLSLSPGK

SEQ ID NO: 117 - protein, 217 aa, Artificial Sequence
  Synthetic Construct
APELLGGPSVFLFPPKPKDTLMISRTPEVTCVVVDVSHEDPEVKFNWYVDGVEVHNAKTKPREEQYNSTYRVVSVLTVLHQDWLNGKEYKCKVSNKALPAPIEKTISKAKGQPREPQVYTLPPSRDELTKNQVSLTCLVKGFYPSDIAVWWESFGTEWVSYKTTPPVLDSDGSFFLYSKLTVTKEEWQQGFVFSCSVMHEALHNHYTQKSLSLSPGK

SEQ ID NO: 118 - protein, 217 aa, Artificial Sequence
  Synthetic Construct
APELLGGPSVFLFPPKPKDTLMISRTPEVTCVVVDVSHEDPEVKFNWYVDGVEVHNAKTKPREEQYNSTYRVVSVLTVLHQDWLNGKEYKCKVSNKALPAPIEKTISKAKGQPREPQVYTLPPSRDELTKNQVSLTCLVKGFYPSDIAVEWESFGTEWSNYKTTPPVLDSDGSFFLYSKLTVTKEEWQQGFVFSCSVMHEALHNHYTQKSLSLSPGK

SEQ ID NO: 119 - protein, 217 aa, Artificial Sequence
  Synthetic Construct
APELLGGPSVFLFPPKPKDTLMISRTPEVTCVVVDVSHEDPEVKFNWYVDGVEVHNAKTKPREEQYNSTYRVVSVLTVLHQDWLNGKEYKCKVSNKALPAPIEKTISKAKGQPREPQVYTLPPSRDELTKNQVSLTCLVKGFYPSDIAVEWESYGTEWANYKTTPPVLDSDGSFFLYSKLTVTKEEWQQGFVFSCSVMHEALHNHYTQKSLSLSPGK

SEQ ID NO: 120 - protein, 217 aa, Artificial Sequence
  Synthetic Construct
APELLGGPSVFLFPPKPKDTLMISRTPEVTCVVVDVSHEDPEVKFNWYVDGVEVHNAKTKPREEQYNSTYRVVSVLTVLHQDWLNGKEYKCKVSNKALPAPIEKTISKAKGQPREPQVYTLPPSRDELTKNQVSLTCLVKGFYPSDIAVEWESYGTEWVNYKTTPPVLDSDGSFFLYSKLTVTKEEWQQGFVFSCSVMHEALHNHYTQKSLSLSPGK

SEQ ID NO: 121 - protein, 217 aa, Artificial Sequence
  Synthetic Construct
APELLGGPSVFLFPPKPKDTLMISRTPEVTCVVVDVSHEDPEVKFNWYVDGVEVHNAKTKPREEQYNSTYRVVSVLTVLHQDWLNGKEYKCKVSNKALPAPIEKTISKAKGQPREPQVYTLPPSRDELTKNQVSLTCLVKGFYPSDIAVEWESYGTEWSNYKTTPPVLDSDGSFFLYSKLTVSKEEWQQGFVFSCSVMHEALHNHYTQKSLSLSPGK

SEQ ID NO: 122 - protein, 217 aa, Artificial Sequence
  Synthetic Construct
APELLGGPSVFLFPPKPKDTLMISRTPEVTCVVVDVSHEDPEVKFNWYVDGVEVHNAKTKPREEQYNSTYRVVSVLTVLHQDWLNGKEYKCKVSNKALPAPIEKTISKAKGQPREPQVYTLPPSRDELTKNQVSLTCLVKGFYPSDIAVEWESFGTEWANYKTTPPVLDSDGSFFLYSKLTVTKEEWQQGFVFSCSVMHEALHNHYTQKSLSLSPGK

SEQ ID NO: 123 - protein, 217 aa, Artificial Sequence
  Synthetic Construct
APELLGGPSVFLFPPKPKDTLMISRTPEVTCVVVDVSHEDPEVKFNWYVDGVEVHNAKTKPREEQYNSTYRVVSVLTVLHQDWLNGKEYKCKVSNKALPAPIEKTISKAKGQPREPQVYTLPPSRDELTKNQVSLTCLVKGFYPSDIAVEWESFGTEWVNYKTTPPVLDSDGSFFLYSKLTVTKEEWQQGFVFSCSVMHEALHNHYTQKSLSLSPGK

SEQ ID NO: 124 - protein, 217 aa, Artificial Sequence
  Synthetic Construct
APELLGGPSVFLFPPKPKDTLMISRTPEVTCVVVDVSHEDPEVKFNWYVDGVEVHNAKTKPREEQYNSTYRVVSVLTVLHQDWLNGKEYKCKVSNKALPAPIEKTISKAKGQPREPQVYTLPPSRDELTKNQVSLTCLVKGFYPSDIAVWWESFGTEWSNYKTTPPVLDSDGSFFLYSKLTVTKEEWQQGFVFSCSVMHEALHNHYTQKSLSLSPGK

SEQ ID NO: 125 - protein, 217 aa, Artificial Sequence
  Synthetic Construct
APELLGGPSVFLFPPKPKDTLMISRTPEVTCVVVDVSHEDPEVKFNWYVDGVEVHNAKTKPREEQYNSTYRVVSVLTVLHQDWLNGKEYKCKVSNKALPAPIEKTISKAKGQPREPQVYTLPPSRDELTKNQVSLTCLVKGFYPSDIAVWWESYGTEWANYKTTPPVLDSDGSFFLYSKLTVTKEEWQQGFVFSCSVMHEALHNHYTQKSLSLSPGK

SEQ ID NO: 126 - protein, 217 aa, Artificial Sequence
  Synthetic Construct
APELLGGPSVFLFPPKPKDTLMISRTPEVTCVVVDVSHEDPEVKFNWYVDGVEVHNAKTKPREEQYNSTYRVVSVLTVLHQDWLNGKEYKCKVSNKALPAPIEKTISKAKGQPREPQVYTLPPSRDELTKNQVSLTCLVKGFYPSDIAVWWESYGTEWVNYKTTPPVLDSDGSFFLYSKLTVTKEEWQQGFVFSCSVMHEALHNHYTQKSLSLSPGK

SEQ ID NO: 127 - protein, 217 aa, Artificial Sequence
  Synthetic Construct
APELLGGPSVFLFPPKPKDTLMISRTPEVTCVVVDVSHEDPEVKFNWYVDGVEVHNAKTKPREEQYNSTYRVVSVLTVLHQDWLNGKEYKCKVSNKALPAPIEKTISKAKGQPREPQVYTLPPSRDELTKNQVSLTCLVKGFYPSDIAVWWESYGTEWSNYKTTPPVLDSDGSFFLYSKLTVSKEEWQQGFVFSCSVMHEALHNHYTQKSLSLSPGK

SEQ ID NO: 128 - protein, 217 aa, Artificial Sequence
  Synthetic Construct
APELLGGPSVFLFPPKPKDTLMISRTPEVTCVVVDVSHEDPEVKFNWYVDGVEVHNAKTKPREEQYNSTYRVVSVLTVLHQDWLNGKEYKCKVSNKALPAPIEKTISKAKGQPREPQVYTLPPSRDELTKNQVSLTCLVKGFYPSDIAVWWESFGTEWANYKTTPPVLDSDGSFFLYSKLTVTKEEWQQGFVFSCSVMHEALHNHYTQKSLSLSPGK

SEQ ID NO: 129 - protein, 217 aa, Artificial Sequence
  Synthetic Construct
APELLGGPSVFLFPPKPKDTLMISRTPEVTCVVVDVSHEDPEVKFNWYVDGVEVHNAKTKPREEQYNSTYRVVSVLTVLHQDWLNGKEYKCKVSNKALPAPIEKTISKAKGQPREPQVYTLPPSRDELTKNQVSLTCLVKGFYPSDIAVWWESFGTEWVNYKTTPPVLDSDGSFFLYSKLTVTKEEWQQGFVFSCSVMHEALHNHYTQKSLSLSPGK

SEQ ID NO: 130 - protein, 217 aa, Artificial Sequence
  Synthetic Construct
APELLGGPSVFLFPPKPKDTLMISRTPEVTCVVVDVSHEDPEVKFNWYVDGVEVHNAKTKPREEQYNSTYRVVSVLTVLHQDWLNGKEYKCKVSNKALPAPIEKTISKAKGQPREPQVYTLPPSRDELTKNQVSLTCLVKGFYPSDIAVLWESFGTEWSSYKTTPPVLDSDGSFFLYSKLTVTKEEWQQGFVFSCSVMHEALHNHYTQKSLSLSPGK

SEQ ID NO: 131 - protein, 217 aa, Artificial Sequence
  Synthetic Construct
APELLGGPSVFLFPPKPKDTLMISRTPEVTCVVVDVSHEDPEVKFNWYVDGVEVHNAKTKPREEQYNSTYRVVSVLTVLHQDWLNGKEYKCKVSNKALPAPIEKTISKAKGQPREPQVYTLPPSRDELTKNQVSLTCLVKGFYPSDIAVLWESYGTEWASYKTTPPVLDSDGSFFLYSKLTVTKEEWQQGFVFSCSVMHEALHNHYTQKSLSLSPGK

SEQ ID NO: 132 - protein, 217 aa, Artificial Sequence
  Synthetic Construct
APELLGGPSVFLFPPKPKDTLMISRTPEVTCVVVDVSHEDPEVKFNWYVDGVEVHNAKTKPREEQYNSTYRVVSVLTVLHQDWLNGKEYKCKVSNKALPAPIEKTISKAKGQPREPQVYTLPPSRDELTKNQVSLTCLVKGFYPSDIAVLWESYGTEWVSYKTTPPVLDSDGSFFLYSKLTVTKEEWQQGFVFSCSVMHEALHNHYTQKSLSLSPGK

SEQ ID NO: 133 - protein, 217 aa, Artificial Sequence
  Synthetic Construct
APELLGGPSVFLFPPKPKDTLMISRTPEVTCVVVDVSHEDPEVKFNWYVDGVEVHNAKTKPREEQYNSTYRVVSVLTVLHQDWLNGKEYKCKVSNKALPAPIEKTISKAKGQPREPQVYTLPPSRDELTKNQVSLTCLVKGFYPSDIAVLWESYGTEWSSYKTTPPVLDSDGSFFLYSKLTVSKEEWQQGFVFSCSVMHEALHNHYTQKSLSLSPGK

SEQ ID NO: 134 - protein, 217 aa, Artificial Sequence
  Synthetic Construct
APELLGGPSVFLFPPKPKDTLMISRTPEVTCVVVDVSHEDPEVKFNWYVDGVEVHNAKTKPREEQYNSTYRVVSVLTVLHQDWLNGKEYKCKVSNKALPAPIEKTISKAKGQPREPQVYTLPPSRDELTKNQVSLTCLVKGFYPSDIAVLWESFGTEWASYKTTPPVLDSDGSFFLYSKLTVTKEEWQQGFVFSCSVMHEALHNHYTQKSLSLSPGK

SEQ ID NO: 135 - protein, 217 aa, Artificial Sequence
  Synthetic Construct
APELLGGPSVFLFPPKPKDTLMISRTPEVTCVVVDVSHEDPEVKFNWYVDGVEVHNAKTKPREEQYNSTYRVVSVLTVLHQDWLNGKEYKCKVSNKALPAPIEKTISKAKGQPREPQVYTLPPSRDELTKNQVSLTCLVKGFYPSDIAVLWESFGTEWVSYKTTPPVLDSDGSFFLYSKLTVTKEEWQQGFVFSCSVMHEALHNHYTQKSLSLSPGK

SEQ ID NO: 136 - protein, 217 aa, Artificial Sequence
  Synthetic Construct
APELLGGPSVFLFPPKPKDTLMISRTPEVTCVVVDVSHEDPEVKFNWYVDGVEVHNAKTKPREEQYNSTYRVVSVLTVLHQDWLNGKEYKCKVSNKALPAPIEKTISKAKGQPREPQVYTLPPSRDELTKNQVSLTCLVKGFYPSDIAVEWESYGTEWSNYKTTPPVLDSDGSFFLYSKLTVTKSEWQQGFVFSCSVMHEALHNHYTQKSLSLSPGK

SEQ ID NO: 137 - protein, 217 aa, Artificial Sequence
  Synthetic Construct
APELLGGPSVFLFPPKPKDTLMISRTPEVTCVVVDVSHEDPEVKFNWYVDGVEVHNAKTKPREEQYNSTYRVVSVLTVLHQDWLNGKEYKCKVSNKALPAPIEKTISKAKGQPREPQVYTLPPSRDELTKNQVSLTCLVKGFYPSDIAVEWESLGLVWVGYKTTPPVLDSDGSFFLYSKLTVAKSTWQQGWVFSCSVMHEALHNHYTQKSLSLSPGK

SEQ ID NO: 138 - protein, 217 aa, Artificial Sequence
  Synthetic Construct
APELLGGPSVFLFPPKPKDTLMISRTPEVTCVVVDVSHEDPEVKFNWYVDGVEVHNAKTKPREEQYNSTYRVVSVLTVLHQDWLNGKEYKCKVSNKALPAPIEKTISKAKGQPREPQVYTLPPSRDELTKNQVSLTCLVKGFYPSDIAVEWESYGTVWSHYKTTPPVLDSDGSFFLYSKLTVSKSEWQQGYVFSCSVMHEALHNHYTQKSLSLSPGK

SEQ ID NO: 139 - protein, 217 aa, Artificial Sequence
  Synthetic Construct
APELLGGPSVFLFPPKPKDTLMISRTPEVTCVVVDVSHEDPEVKFNWYVDGVEVHNAKTKPREEQYNSTYRVVSVLTVLHQDWLNGKEYKCKVSNKALPAPIEKTISKAKGQPREPQVYTLPPSRDELTKNQVSLTCLVKGFYPSDIAVEWESYGTEWSQYKTTPPVLDSDGSFFLYSKLTVEKSDWQQGHVFSCSVMHEALHNHYTQKSLSLSPGK

SEQ ID NO: 140 - protein, 217 aa, Artificial Sequence
  Synthetic Construct
APELLGGPSVFLFPPKPKDTLMISRTPEVTCVVVDVSHEDPEVKFNWYVDGVEVHNAKTKPREEQYNSTYRVVSVLTVLHQDWLNGKEYKCKVSNKALPAPIEKTISKAKGQPREPQVYTLPPSRDELTKNQVSLTCLVKGFYPSDIAVEWESVGTPWALYKTTPPVLDSDGSFFLYSKLTVLKSEWQQGWVFSCSVMHEALHNHYTQKSLSLSPGK

SEQ ID NO: 141 - protein, 217 aa, Artificial Sequence
  Synthetic Construct
APELLGGPSVFLFPPKPKDTLMISRTPEVTCVVVDVSHEDPEVKFNWYVDGVEVHNAKTKPREEQYNSTYRVVSVLTVLHQDWLNGKEYKCKVSNKALPAPIEKTISKAKGQPREPQVYTLPPSRDELTKNQVSLTCLVKGFYPSDIAVEWESYGTVWSKYKTTPPVLDSDGSFFLYSKLTVSKSEWQQGFVFSCSVMHEALHNHYTQKSLSLSPGK

SEQ ID NO: 142 - protein, 217 aa, Artificial Sequence
  Synthetic Construct
APELLGGPSVFLFPPKPKDTLMISRTPEVTCVVVDVSHEDPEVKFNWYVDGVEVHNAKTKPREEQYNSTYRVVSVLTVLHQDWLNGKEYKCKVSNKALPAPIEKTISKAKGQPREPQVYTLPPSRDELTKNQVSLTCLVKGFYPSDIAVEWESLGHVWAVYKTTPPVLDSDGSFFLYSKLTVPKSTWQQGWVFSCSVMHEALHNHYTQKSLSLSPGK

SEQ ID NO: 143 - protein, 217 aa, Artificial Sequence
  Synthetic Construct
APELLGGPSVFLFPPKPKDTLMISRTPEVTCVVVDVSHEDPEVKFNWYVDGVEVHNAKTKPREEQYNSTYRVVSVLTVLHQDWLNGKEYKCKVSNKALPAPIEKTISKAKGQPREPQVYTLPPSRDELTKNQVSLTCLVKGFYPSDIAVEWESLGLVWVGYKTTPPVLDSDGSFFLYSKLTVPKSTWQQGWVFSCSVMHEALHNHYTQKSLSLSPGK

SEQ ID NO: 144 - protein, 217 aa, Artificial Sequence
  Synthetic Construct
APELLGGPSVFLFPPKPKDTLMISRTPEVTCVVVDVSHEDPEVKFNWYVDGVEVHNAKTKPREEQYNSTYRVVSVLTVLHQDWLNGKEYKCKVSNKALPAPIEKTISKAKGQPREPQVYTLPPSRDELTKNQVSLTCLVKGFYPSDIAVEWESMGHVWVGYKTTPPVLDSDGSFFLYSKLTVDKSTWQQGWVFSCSVMHEALHNHYTQKSLSLSPGK

SEQ ID NO: 145 - protein, 217 aa, Artificial Sequence
  Synthetic Construct
APELLGGPSVFLFPPKPKDTLMISRTPEVTCVVVDVSHEDPEVKFNWYVDGVEVHNAKTKPREEQYNSTYRVVSVLTVLHQDWLNGKEYKCKVSNKALPAPIEKTISKAKGQPREPQVYTLPPSRDELTKNQVSLTCLVKGFYPSDIAVEWESLGLVWVFSKTTPPVLDSDGSFFLYSKLTVPKSTWQQGWVFSCSVMHEALHNHYTQKSLSLSPGK

SEQ ID NO: 146 - protein, 217 aa, Artificial Sequence
  Synthetic Construct
APELLGGPSVFLFPPKPKDTLMISRTPEVTCVVVDVSHEDPEVKFNWYVDGVEVHNAKTKPREEQYNSTYRVVSVLTVLHQDWLNGKEYKCKVSNKALPAPIEKTISKAKGQPREPQVYTLPPSRDELTKNQVSLTCLVKGFYPSDIAVEWESYGTEWSSYKTTPPVLDSDGSFFLYSKLTVTKSEWQQGFVFSCSVMHEALHNHYTQKSLSLSPGK

SEQ ID NO: 147 - protein, 217 aa, Artificial Sequence
  Synthetic Construct
APELLGGPSVFLFPPKPKDTLMISRTPEVTCVVVDVSHEDPEVKFNWYVDGVEVHNAKTKPREEQYNSTYRVVSVLTVLHQDWLNGKEYKCKVSNKALPAPIEKTISKAKGQPREPQVYTLPPSRDELTKNQVSLTCLVKGFYPSDIAVEWESYGTEWSNYKTTPPVLDSDGSFFLYSKLTVSKSEWQQGFVFSCSVMHEALHNHYTQKSLSLSPGK

SEQ ID NO: 148 - protein, 217 aa, Artificial Sequence
  Synthetic Construct
APELLGGPSVFLFPPKPKDTLMISRTPEVTCVVVDVSHEDPEVKFNWYVDGVEVHNAKTKPREEQYNSTYRVVSVLTVLHQDWLNGKEYKCKVSNKALPAPIEKTISKAKGQPREPQVYTLPPSRDELTKNQVSLTCLVKGFYPSDIAVEWESLGHVWVGYKTTPPVLDSDGSFFLYSKLTVSKSEWQQGWVFSCSVMHEALHNHYTQKSLSLSPGK

SEQ ID NO: 149 - protein, 217 aa, Artificial Sequence
  Synthetic Construct
APELLGGPSVFLFPPKPKDTLMISRTPEVTCVVVDVSHEDPEVKFNWYVDGVEVHNAKTKPREEQYNSTYRVVSVLTVLHQDWLNGKEYKCKVSNKALPAPIEKTISKAKGQPREPQVYTLPPSRDELTKNQVSLTCLVKGFYPSDIAVEWESLGHVWVATKTTPPVLDSDGSFFLYSKLTVPKSTWQQGWVFSCSVMHEALHNHYTQKSLSLSPGK

SEQ ID NO: 150 - protein, 217 aa, Artificial Sequence
  Synthetic Construct
APELLGGPSVFLFPPKPKDTLMISRTPEVTCVVVDVSHEDPEVKFNWYVDGVEVHNAKTKPREEQYNSTYRVVSVLTVLHQDWLNGKEYKCKVSNKALPAPIEKTISKAKGQPREPQVYTLPPSRDELTKNQVSLTCLVKGFYPSDIAVEWESLGPVWVHTKTTPPVLDSDGSFFLYSKLTVPKSTWQQGWVFSCSVMHEALHNHYTQKSLSLSPGK

SEQ ID NO: 151 - protein, 217 aa, Artificial Sequence
  Synthetic Construct
APELLGGPSVFLFPPKPKDTLMISRTPEVTCVVVDVSHEDPEVKFNWYVDGVEVHNAKTKPREEQYNSTYRVVSVLTVLHQDWLNGKEYKCKVSNKALPAPIEKTISKAKGQPREPQVYTLPPSRDELTKNQVSLTCLVKGFYPSDIAVEWESLGHVWVDQKTTPPVLDSDGSFFLYSKLTVPKSTWQQGWVFSCSVMHEALHNHYTQKSLSLSPGK

SEQ ID NO: 152 - protein, 217 aa, Artificial Sequence
  Synthetic Construct
APELLGGPSVFLFPPKPKDTLMISRTPEVTCVVVDVSHEDPEVKFNWYVDGVEVHNAKTKPREEQYNSTYRVVSVLTVLHQDWLNGKEYKCKVSNKALPAPIEKTISKAKGQPREPQVYTLPPSRDELTKNQVSLTCLVKGFYPSDIAVEWESLGHVWVNQKTTPPVLDSDGSFFLYSKLTVPKSTWQQGWVFSCSVMHEALHNHYTQKSLSLSPGK

SEQ ID NO: 153 - protein, 217 aa, Artificial Sequence
  Synthetic Construct
APELLGGPSVFLFPPKPKDTLMISRTPEVTCVVVDVSHEDPEVKFNWYVDGVEVHNAKTKPREEQYNSTYRVVSVLTVLHQDWLNGKEYKCKVSNKALPAPIEKTISKAKGQPREPQVYTLPPSRDELTKNQVSLTCLVKGFYPSDIAVEWESLGHVWVNFKTTPPVLDSDGSFFLYSKLTVPKSTWQQGWVFSCSVMHEALHNHYTQKSLSLSPGK

SEQ ID NO: 154 - protein, 217 aa, Artificial Sequence
  Synthetic Construct
APELLGGPSVFLFPPKPKDTLMISRTPEVTCVVVDVSHEDPEVKFNWYVDGVEVHNAKTKPREEQYNSTYRVVSVLTVLHQDWLNGKEYKCKVSNKALPAPIEKTISKAKGQPREPQVYTLPPSRDELTKNQVSLTCLVKGFYPSDIAVWWESLGHVWAVYKTTPPVLDSDGSFFLYSKLTVPKSTWQQGWVFSCSVMHEALHNHYTQKSLSLSPGK

SEQ ID NO: 155 - protein, 217 aa, Artificial Sequence
  Synthetic Construct
APELLGGPSVFLFPPKPKDTLMISRTPEVTCVVVDVSHEDPEVKFNWYVDGVEVHNAKTKPREEQYNSTYRVVSVLTVLHQDWLNGKEYKCKVSNKALPAPIEKTISKAKGQPREPQVYTLPPSRDELTKNQVSLTCLVKGFYPSDIAVLWESLGHVWAVYKTTPPVLDSDGSFFLYSKLTVPKSTWQQGWVFSCSVMHEALHNHYTQKSLSLSPGK

SEQ ID NO: 156 - protein, 217 aa, Artificial Sequence
  Synthetic Construct
APELLGGPSVFLFPPKPKDTLMISRTPEVTCVVVDVSHEDPEVKFNWYVDGVEVHNAKTKPREEQYNSTYRVVSVLTVLHQDWLNGKEYKCKVSNKALPAPIEKTISKAKGQPREPQVYTLPPSRDELTKNQVSLTCLVKGFYPSDIAVYWESLGHVWAVYKTTPPVLDSDGSFFLYSKLTVPKSTWQQGWVFSCSVMHEALHNHYTQKSLSLSPGK

SEQ ID NO: 157 - protein, 217 aa, Artificial Sequence
  Synthetic Construct
APELLGGPSVFLFPPKPKDTLMISRTPEVTCVVVDVSHEDPEVKFNWYVDGVEVHNAKTKPREEQYNSTYRVVSVLTVLHQDWLNGKEYKCKVSNKALPAPIEKTISKAKGQPREPQVYTLPPSRDELTKNQVSLTCLVKGFYPSDIAVEWESLGHVWAVYQTTPPVLDSDGSFFLYSKLTVPKSTWQQGWVFSCSVMHEALHNHYTQKSLSLSPGK

SEQ ID NO: 158 - protein, 217 aa, Artificial Sequence
  Synthetic Construct
APELLGGPSVFLFPPKPKDTLMISRTPEVTCVVVDVSHEDPEVKFNWYVDGVEVHNAKTKPREEQYNSTYRVVSVLTVLHQDWLNGKEYKCKVSNKALPAPIEKTISKAKGQPREPQVYTLPPSRDELTKNQVSLTCLVKGFYPSDIAVEWESLGHVWAVYFTTPPVLDSDGSFFLYSKLTVPKSTWQQGWVFSCSVMHEALHNHYTQKSLSLSPGK

SEQ ID NO: 159 - protein, 217 aa, Artificial Sequence
  Synthetic Construct
APELLGGPSVFLFPPKPKDTLMISRTPEVTCVVVDVSHEDPEVKFNWYVDGVEVHNAKTKPREEQYNSTYRVVSVLTVLHQDWLNGKEYKCKVSNKALPAPIEKTISKAKGQPREPQVYTLPPSRDELTKNQVSLTCLVKGFYPSDIAVEWESLGHVWAVYHTTPPVLDSDGSFFLYSKLTVPKSTWQQGWVFSCSVMHEALHNHYTQKSLSLSPGK

SEQ ID NO: 160 - protein, 217 aa, Artificial Sequence; identical to SEQ ID NO: 154
  Synthetic Construct

SEQ ID NO: 161 - protein, 217 aa, Artificial Sequence; identical to SEQ ID NO: 157
  Synthetic Construct

SEQ ID NO: 162 - protein, 217 aa, Artificial Sequence
  Synthetic Construct
APELLGGPSVFLFPPKPKDTLMISRTPEVTCVVVDVSHEDPEVKFNWYVDGVEVHNAKTKPREEQYNSTYRVVSVLTVLHQDWLNGKEYKCKVSNKALPAPIEKTISKAKGQPREPQVYTLPPSRDELTKNQVSLTCLVKGFYPSDIAVWWESLGHVWAVYQTTPPVLDSDGSFFLYSKLTVPKSTWQQGWVFSCSVMHEALHNHYTQKSLSLSPGK

SEQ ID NO: 163 - protein, 217 aa, Artificial Sequence
  Synthetic Construct
APELLGGPSVFLFPPKPKDTLMISRTPEVTCVVVDVSHEDPEVKFNWYVDGVEVHNAKTKPREEQYNSTYRVVSVLTVLHQDWLNGKEYKCKVSNKALPAPIEKTISKAKGQPREPQVYTLPPSRDELTKNQVSLTCLVKGFYPSDIAVWWESLGHVWVNQKTTPPVLDSDGSFFLYSKLTVPKSTWQQGWVFSCSVMHEALHNHYTQKSLSLSPGK

SEQ ID NO: 164 - protein, 217 aa, Artificial Sequence
  Synthetic Construct
APELLGGPSVFLFPPKPKDTLMISRTPEVTCVVVDVSHEDPEVKFNWYVDGVEVHNAKTKPREEQYNSTYRVVSVLTVLHQDWLNGKEYKCKVSNKALPAPIEKTISKAKGQPREPQVYTLPPSRDELTKNQVSLTCLVKGFYPSDIAVEWESLGHVWVNQQTTPPVLDSDGSFFLYSKLTVPKSTWQQGWVFSCSVMHEALHNHYTQKSLSLSPGK

SEQ ID NO: 165 - protein, 217 aa, Artificial Sequence
  Synthetic Construct
APELLGGPSVFLFPPKPKDTLMISRTPEVTCVVVDVSHEDPEVKFNWYVDGVEVHNAKTKPREEQYNSTYRVVSVLTVLHQDWLNGKEYKCKVSNKALPAPIEKTISKAKGQPREPQVYTLPPSRDELTKNQVSLTCLVKGFYPSDIAVWWESLGHVWVNQQTTPPVLDSDGSFFLYSKLTVPKSTWQQGWVFSCSVMHEALHNHYTQKSLSLSPGK

SEQ ID NO: 166 - protein, 217 aa, Artificial Sequence
  Synthetic Construct
APELLGGPSVFLFPPKPKDTLMISRTPEVTCVVVDVSHEDPEVKFNWYVDGVEVHNAKTKPREEQYNSTYRVVSVLTVLHQDWLNGKEYKCKVSNKALPAPIEKTISKAKGQPREPQVYTLPPSRDELTKNQVSLTCLVKGFYPSDIAVWWESYGTEWSSYKTTPPVLDSDGSFFLYSKLTVTKSEWQQGFVFSCSVMHEALHNHYTQKSLSLSPGK

SEQ ID NO: 167 - protein, 217 aa, Artificial Sequence
  Synthetic Construct
APELLGGPSVFLFPPKPKDTLMISRTPEVTCVVVDVSHEDPEVKFNWYVDGVEVHNAKTKPREEQYNSTYRVVSVLTVLHQDWLNGKEYKCKVSNKALPAPIEKTISKAKGQPREPQVYTLPPSRDELTKNQVSLTCLVKGFYPSDIAVEWESYGTEWSSYQTTPPVLDSDGSFFLYSKLTVTKSEWQQGFVFSCSVMHEALHNHYTQKSLSLSPGK

SEQ ID NO: 168 - protein, 217 aa, Artificial Sequence
  Synthetic Construct
APELLGGPSVFLFPPKPKDTLMISRTPEVTCVVVDVSHEDPEVKFNWYVDGVEVHNAKTKPREEQYNSTYRVVSVLTVLHQDWLNGKEYKCKVSNKALPAPIEKTISKAKGQPREPQVYTLPPSRDELTKNQVSLTCLVKGFYPSDIAVEWESYGTEWSNYQTTPPVLDSDGSFFLYSKLTVTKSEWQQGFVFSCSVMHEALHNHYTQKSLSLSPGK

SEQ ID NO: 169 - protein, 217 aa, Artificial Sequence
  Synthetic Construct
APELLGGPSVFLFPPKPKDTLMISRTPEVTCVVVDVSHEDPEVKFNWYVDGVEVHNAKTKPREEQYNSTYRVVSVLTVLHQDWLNGKEYKCKVSNKALPAPIEKTISKAKGQPREPQVYTLPPSRDELTKNQVSLTCLVKGFYPSDIAVLWESYGTEWSSYKTTPPVLDSDGSFFLYSKLTVTKSEWQQGFVFSCSVMHEALHNHYTQKSLSLSPGK

SEQ ID NO: 170 - protein, 217 aa, Artificial Sequence
  Synthetic Construct
APELLGGPSVFLFPPKPKDTLMISRTPEVTCVVVDVSHEDPEVKFNWYVDGVEVHNAKTKPREEQYNSTYRVVSVLTVLHQDWLNGKEYKCKVSNKALPAPIEKTISKAKGQPREPQVYTLPPSRDELTKNQVSLTCLVKGFYPSDIAVLWESYGTEWSSYRTTPPVLDSDGSFFLYSKLTVTKSEWQQGFVFSCSVMHEALHNHYTQKSLSLSPGK

SEQ ID NO: 171 - protein, 217 aa, Artificial Sequence
  Synthetic Construct
APELLGGPSVFLFPPKPKDTLMISRTPEVTCVVVDVSHEDPEVKFNWYVDGVEVHNAKTKPREEQYNSTYRVVSVLTVLHQDWLNGKEYKCKVSNKALPAPIEKTISKAKGQPREPQVYTLPPSRDELTKNQVSLTCLVKGFYPSDIAVLWESYGTEWSSYRTTPPVLDSDGSFFLYSKLTVTREEWQQGFVFSCSVMHEALHNHYTQKSLSLSPGK

SEQ ID NO: 172 - protein, 217 aa, Artificial Sequence
  Synthetic Construct
APELLGGPSVFLFPPKPKDTLMISRTPEVTCVVVDVSHEDPEVKFNWYVDGVEVHNAKTKPREEQYNSTYRVVSVLTVLHQDWLNGKEYKCKVSNKALPAPIEKTISKAKGQPREPQVYTLPPSRDELTKNQVSLTCLVKGFYPSDIAVLWESYGTEWSSYRTTPPVLDSDGSFFLYSKLTVTGEEWQQGFVFSCSVMHEALHNHYTQKSLSLSPGK

SEQ ID NO: 173 - protein, 217 aa, Artificial Sequence
  Synthetic Construct
APELLGGPSVFLFPPKPKDTLMISRTPEVTCVVVDVSHEDPEVKFNWYVDGVEVHNAKTKPREEQYNSTYRVVSVLTVLHQDWLNGKEYKCKVSNKALPAPIEKTISKAKGQPREPQVYTLPPSRDELTKNQVSLTCLVKGFYPSDIAVLWESYGTEWSSYRTTPPVLDSDGSFFLYSKLTVTREEWQQGFVFSCWVMHEALHNHYTQKSLSLSPGK

SEQ ID NO: 174 - protein, 217 aa, Artificial Sequence
  Synthetic Construct
APELLGGPSVFLFPPKPKDTLMISRTPEVTCVVVDVSHEDPEVKFNWYVDGVEVHNAKTKPREEQYNSTYRVVSVLTVLHQDWLNGKEYKCKVSNKALPAPIEKTISKAKGQPREPQVYTLPPSRDELTKNQVSLTCLVKGFYPSDIAVLWESYGTEWSSYRTTPPVLDSDGSFFLYSKLTVTKEEWQQGFVFSCWVMHEALHNHYTQKSLSLSPGK

SEQ ID NO: 175 - protein, 217 aa, Artificial Sequence
  Synthetic Construct
APELLGGPSVFLFPPKPKDTLMISRTPEVTCVVVDVSHEDPEVKFNWYVDGVEVHNAKTKPREEQYNSTYRVVSVLTVLHQDWLNGKEYKCKVSNKALPAPIEKTISKAKGQPREPQVYTLPPSRDELTKNQVSLTCLVKGFYPSDIAVLWESYGTEWSSYRTTPPVLDSDGSFFLYSKLTVTREEWQQGFVFTCWVMHEALHNHYTQKSLSLSPGK

SEQ ID NO: 176 - protein, 217 aa, Artificial Sequence
  Synthetic Construct
APELLGGPSVFLFPPKPKDTLMISRTPEVTCVVVDVSHEDPEVKFNWYVDGVEVHNAKTKPREEQYNSTYRVVSVLTVLHQDWLNGKEYKCKVSNKALPAPIEKTISKAKGQPREPQVYTLPPSRDELTKNQVSLTCLVKGFYPSDIAVLWESYGTEWSSYRTTPPVLDSDGSFFLYSKLTVTREEWQQGFVFTCGVMHEALHNHYTQKSLSLSPGK

SEQ ID NO: 177 - protein, 217 aa, Artificial Sequence
  Synthetic Construct
APELLGGPSVFLFPPKPKDTLMISRTPEVTCVVVDVSHEDPEVKFNWYVDGVEVHNAKTKPREEQYNSTYRVVSVLTVLHQDWLNGKEYKCKVSNKALPAPIEKTISKAKGQPREPQVYTLPPSRDELTKNQVSLTCLVKGFYPSDIAVLWESYGTEWSSYRTTPPVLDSDGSFFLYSKLTVTREEWQQGFVFECWVMHEALHNHYTQKSLSLSPGK

SEQ ID NO: 178 - protein, 217 aa, Artificial Sequence
  Synthetic Construct
APELLGGPSVFLFPPKPKDTLMISRTPEVTCVVVDVSHEDPEVKFNWYVDGVEVHNAKTKPREEQYNSTYRVVSVLTVLHQDWLNGKEYKCKVSNKALPAPIEKTISKAKGQPREPQVYTLPPSRDELTKNQVSLTCLVKGFYPSDIAVLWESYGTEWSSYRTTPPVLDSDGSFFLYSKLTVTREEWQQGFVFKCWVMHEALHNHYTQKSLSLSPGK

SEQ ID NO: 179 - protein, 217 aa, Artificial Sequence
  Synthetic Construct
APELLGGPSVFLFPPKPKDTLMISRTPEVTCVVVDVSHEDPEVKFNWYVDGVEVHNAKTKPREEQYNSTYRVVSVLTVLHQDWLNGKEYKCKVSNKALPAPIEKTISKAKGQPREPQVYTLPPSRDELTKNQVSLTCLVKGFYPSDIAVLWESYGTEWSSYRTTPPVLDSDGSFFLYSKLTVTPEEWQQGFVFKCWVMHEALHNHYTQKSLSLSPGK

SEQ ID NO: 180 - protein, 217 aa, Artificial Sequence
  Synthetic Construct
APELLGGPSVFLFPPKPKDTLMISRTPEVTCVVVDVSHEDPEVKFNWYVDGVEVHNAKTKPREEQYNSTYRVVSVLTVLHQDWLNGKEYKCKVSNKALPAPIEKTISKAKGQPREPQVYTLPPSRDELTKNQVSLTCLVKGFYPSDIAVWWESYGTEWSSYRTTPPVLDSDGSFFLYSKLTVTREEWQQGFVFSCSVMHEALHNHYTQKSLSLSPGK

SEQ ID NO: 181 - protein, 217 aa, Artificial Sequence
  Synthetic Construct
APELLGGPSVFLFPPKPKDTLMISRTPEVTCVVVDVSHEDPEVKFNWYVDGVEVHNAKTKPREEQYNSTYRVVSVLTVLHQDWLNGKEYKCKVSNKALPAPIEKTISKAKGQPREPQVYTLPPSRDELTKNQVSLTCLVKGFYPSDIAVWWESYGTEWSSYRTTPPVLDSDGSFFLYSKLTVTGEEWQQGFVFSCSVMHEALHNHYTQKSLSLSPGK

SEQ ID NO: 182 - protein, 217 aa, Artificial Sequence
  Synthetic Construct
APELLGGPSVFLFPPKPKDTLMISRTPEVTCVVVDVSHEDPEVKFNWYVDGVEVHNAKTKPREEQYNSTYRVVSVLTVLHQDWLNGKEYKCKVSNKALPAPIEKTISKAKGQPREPQVYTLPPSRDELTKNQVSLTCLVKGFYPSDIAVWWESYGTEWSSYRTTPPVLDSDGSFFLYSKLTVTREEWQQGFVFTCWVMHEALHNHYTQKSLSLSPGK

SEQ ID NO: 183 - protein, 217 aa, Artificial Sequence
  Synthetic Construct
APELLGGPSVFLFPPKPKDTLMISRTPEVTCVVVDVSHEDPEVKFNWYVDGVEVHNAKTKPREEQYNSTYRVVSVLTVLHQDWLNGKEYKCKVSNKALPAPIEKTISKAKGQPREPQVYTLPPSRDELTKNQVSLTCLVKGFYPSDIAVWWESYGTEWSSYRTTPPVLDSDGSFFLYSKLTVTGEEWQQGFVFTCWVMHEALHNHYTQKSLSLSPGK

SEQ ID NO: 184 - protein, 217 aa, Artificial Sequence
  Synthetic Construct
APELLGGPSVFLFPPKPKDTLMISRTPEVTCVVVDVSHEDPEVKFNWYVDGVEVHNAKTKPREEQYNSTYRVVSVLTVLHQDWLNGKEYKCKVSNKALPAPIEKTISKAKGQPREPQVYTLPPSRDELTKNQVSLTCLVKGFYPSDIAVWWESYGTEWSSYRTTPPVLDSDGSFFLYSKLTVTREEWQQGFVFTCGVMHEALHNHYTQKSLSLSPGK

SEQ ID NO: 185 - protein, 217 aa, Artificial Sequence
  Synthetic Construct
APELLGGPSVFLFPPKPKDTLMISRTPEVTCVVVDVSHEDPEVKFNWYVDGVEVHNAKTKPREEQYNSTYRVVSVLTVLHQDWLNGKEYKCKVSNKALPAPIEKTISKAKGQPREPQVYTLPPSRDELTKNQVSLTCLVKGFYPSDIAVLWESYGTEWSSYRTTPPVLDSDGSFFLYSKLTVTKEEWQQGFVFSCSVMHEALHNHYTQKSLSLSPGK

SEQ ID NO: 186 - protein, 217 aa, Artificial Sequence
  Synthetic Construct
APELLGGPSVFLFPPKPKDTLMISRTPEVTCVVVDVSHEDPEVKFNWYVDGVEVHNAKTKPREEQYNSTYRVVSVLTVLHQDWLNGKEYKCKVSNKALPAPIEKTISKAKGQPRFDYVTTLPPSRDELTKNQVSLTCLVKGFYPSDIAVEWESNGQPENNYKTTPPVLDSDGSFFLYSKLTVDKSRWQQGNVFSCSVMHEALHNHYGFHDLSLSPGK

SEQ ID NO: 187 - protein, 217 aa, Artificial Sequence
  Synthetic Construct
APELLGGPSVFLFPPKPKDTLMISRTPEVTCVVVDVSHEDPEVKFNWYVDGVEVHNAKTKPREEQYNSTYRVVSVLTVLHQDWLNGKEYKCKVSNKALPAPIEKTISKAKGQPRFDMVTTLPPSRDELTKNQVSLTCLVKGFYPSDIAVEWESNGQPENNYKTTPPVLDSDGSFFLYSKLTVDKSRWQQGNVFSCSVMHEALHNHYGFHDLSLSPGK

SEQ ID NO: 188 - protein, 217 aa, Artificial Sequence
  Synthetic Construct
APELLGGPSVFLFPPKPKDTLMISRTPEVTCVVVDVSHEDPEVKFNWYVDGVEVHNAKTKPREEQYNSTYRVVSVLTVLHQDWLNGKEYKCKVSNKALPAPIEKTISKAKGQPRFEYVTTLPPSRDELTKNQVSLTCLVKGFYPSDIAVEWESNGQPENNYKTTPPVLDSDGSFFLYSKLTVDKSRWQQGNVFSCSVMHEALHNHYGFHDLSLSPGK

SEQ ID NO: 189 - protein, 217 aa, Artificial Sequence
  Synthetic Construct
APELLGGPSVFLFPPKPKDTLMISRTPEVTCVVVDVSHEDPEVKFNWYVDGVEVHNAKTKPREEQYNSTYRVVSVLTVLHQDWLNGKEYKCKVSNKALPAPIEKTISKAKGQPRFEMVTTLPPSRDELTKNQVSLTCLVKGFYPSDIAVEWESNGQPENNYKTTPPVLDSDGSFFLYSKLTVDKSRWQQGNVFSCSVMHEALHNHYGFHDLSLSPGK

SEQ ID NO: 190 - protein, 217 aa, Artificial Sequence
  Synthetic Construct
APELLGGPSVFLFPPKPKDTLMISRTPEVTCVVVDVSHEDPEVKFNWYVDGVEVHNAKTKPREEQYNSTYRVVSVLTVLHQDWLNGKEYKCKVSNKALPAPIEKTISKAKGQPRFELVTTLPPSRDELTKNQVSLTCLVKGFYPSDIAVEWESNGQPENNYKTTPPVLDSDGSFFLYSKLTVDKSRWQQGNVFSCSVMHEALHNHYGFHDLSLSPGK

SEQ ID NO: 191 - protein, 217 aa, Artificial Sequence
  Synthetic Construct
APELLGGPSVFLFPPKPKDTLMISRTPEVTCVVVDVSHEDPEVEFIWYVDGVDVRYEWQLPREEQYNSTYRVVSVLTVLHQDWLNGKEYKCKVSNKALPAPIEKTISKAKGQPREPQVYTLPPSRDELTKNQVSLTCLVKGFYPSDIAVEWESNGQPENNYKTTPPVLDSDGSFFLYSKLTVDKSRWQQGNVFSCSVMHEALHNHYTQKSLSLSPGK

SEQ ID NO: 192 - protein, 217 aa, Artificial Sequence
  Synthetic Construct
APELLGGPSVFLFPPKPKDTLMISRTPEVTCVVVDVSHEDPEVGFVWYVDGVPVSWEWYWPREEQYNSTYRVVSVLTVLHQDWLNGKEYKCKVSNKALPAPIEKTISKAKGQPREPQVYTLPPSRDELTKNQVSLTCLVKGFYPSDIAVEWESNGQPENNYKTTPPVLDSDGSFFLYSKLTVDKSRWQQGNVFSCSVMHEALHNHYTQKSLSLSPGK

SEQ ID NO: 193 - protein, 217 aa, Artificial Sequence
  Synthetic Construct
APELLGGPSVFLFPPKPKDTLMISRTPEVTCVVVDVSHEDPEVQFDWYVDGVMVRREWHRPREEQYNSTYRVVSVLTVLHQDWLNGKEYKCKVSNKALPAPIEKTISKAKGQPREPQVYTLPPSRDELTKNQVSLTCLVKGFYPSDIAVEWESNGQPENNYKTTPPVLDSDGSFFLYSKLTVDKSRWQQGNVFSCSVMHEALHNHYTQKSLSLSPGK

SEQ ID NO: 194 - protein, 217 aa, Artificial Sequence
  Synthetic Construct
APELLGGPSVFLFPPKPKDTLMISRTPEVTCVVVDVSHEDPEVSFEWYVDGVPVRWEWQWPREEQYNSTYRVVSVLTVLHQDWLNGKEYKCKVSNKALPAPIEKTISKAKGQPREPQVYTLPPSRDELTKNQVSLTCLVKGFYPSDIAVEWESNGQPENNYKTTPPVLDSDGSFFLYSKLTVDKSRWQQGNVFSCSVMHEALHNHYTQKSLSLSPGK

SEQ ID NO: 195 - protein, 217 aa, Artificial Sequence
  Synthetic Construct
APELLGGPSVFLFPPKPKDTLMISRTPEVTCVVVDVSHEDPEVAFTWYVDGVPVRWEWQNPREEQYNSTYRVVSVLTVLHQDWLNGKEYKCKVSNKALPAPIEKTISKAKGQPREPQVYTLPPSRDELTKNQVSLTCLVKGFYPSDIAVEWESNGQPENNYKTTPPVLDSDGSFFLYSKLTVDKSRWQQGNVFSCSVMHEALHNHYTQKSLSLSPGK

SEQ ID NO: 196 - protein, 217 aa, Artificial Sequence
  Synthetic Construct
APELLGGPSVFLFPPKPKDTLMISRTPEVTCVVVDPQTPPWEVKFNWYVDGVEVHNAKTKPREEEYYTYYRVVSVLTVLHQDWLNGKEYKCKVSNKALPAPIEKTISKAKGQPREPQVYTLPPSRDELTKNQVSLTCLVKGFYPSDIAVEWESNGQPENNYKTTPPVLDSDGSFFLYSKLTVDKSRWQQGNVFSCSVMHEALHNHYTQKSLSLSPGK

SEQ ID NO: 197 - protein, 217 aa, Artificial Sequence
  Synthetic Construct
APELLGGPSVFLFPPKPKDTLMISRTPEVTCVVVDPPSPPWEVKFNWYVDGVEVHNAKTKPREEEYYSNYRVVSVLTVLHQDWLNGKEYKCKVSNKALPAPIEKTISKAKGQPREPQVYTLPPSRDELTKNQVSLTCLVKGFYPSDIAVEWESNGQPENNYKTTPPVLDSDGSFFLYSKLTVDKSRWQQGNVFSCSVMHEALHNHYTQKSLSLSPGK

SEQ ID NO: 198 - protein, 217 aa, Artificial Sequence
  Synthetic Construct
APELLGGPSVFLFPPKPKDTLMISRTPEVTCVVVDPQTPPWEVKFNWYVDGVEVHNAKTKPREEEYYSNYRVVSVLTVLHQDWLNGKEYKCKVSNKALPAPIEKTISKAKGQPREPQVYTLPPSRDELTKNQVSLTCLVKGFYPSDIAVEWESNGQPENNYKTTPPVLDSDGSFFLYSKLTVDKSRWQQGNVFSCSVMHEALHNHYTQKSLSLSPGK

SEQ ID NO: 199 - protein, 217 aa, Artificial Sequence
  Synthetic Construct
APELLGGPSVFLFPPKPKDTLMISRTPEVTCVVVDFRGPPWEVKFNWYVDGVEVHNAKTKPREEEYYHDYRVVSVLTVLHQDWLNGKEYKCKVSNKALPAPIEKTISKAKGQPREPQVYTLPPSRDELTKNQVSLTCLVKGFYPSDIAVEWESNGQPENNYKTTPPVLDSDGSFFLYSKLTVDKSRWQQGNVFSCSVMHEALHNHYTQKSLSLSPGK

SEQ ID NO: 200 - protein, 217 aa, Artificial Sequence
  Synthetic Construct
APELLGGPSVFLFPPKPKDTLMISRTPEVTCVVVDPQTVPWEVKFNWYVDGVEVHNAKTKPREEEYYSNYRVVSVLTVLHQDWLNGKEYKCKVSNKALPAPIEKTISKAKGQPREPQVYTLPPSRDELTKNQVSLTCLVKGFYPSDIAVEWESNGQPENNYKTTPPVLDSDGSFFLYSKLTVDKSRWQQGNVFSCSVMHEALHNHYTQKSLSLSPGK

SEQ ID NO: 201 - protein, 217 aa, Artificial Sequence
  Synthetic Construct
APELLGGPSVFLFPPKPKDTLMISRTPEVTCVVVDVSVPPRMVKFNWYVDGVEVHNAKTKSLTSQHNSTVRVVSVLTVLHQDWLNGKEYKCKVSNKALPAPIEKTISKAKGQPREPQVYTLPPSRDELTKNQVSLTCLVKGFYPSDIAVEWESNGQPENNYKTTPPVLDSDGSFFLYSKLTVDKSRWQQGNVFSCSVMHEALHNHYTQKSLSLSPGK

SEQ ID NO: 202 - protein, 217 aa, Artificial Sequence
  Synthetic Construct
APELLGGPSVFLFPPKPKDTLMISRTPEVTCVVVDVSVPPWMVKFNWYVDGVEVHNAKTKSLTSQHNSTVRVVSVLTVLHQDWLNGKEYKCKVSNKALPAPIEKTISKAKGQPREPQVYTLPPSRDELTKNQVSLTCLVKGFYPSDIAVEWESNGQPENNYKTTPPVLDSDGSFFLYSKLTVDKSRWQQGNVFSCSVMHEALHNHYTQKSLSLSPGK

SEQ ID NO: 203 - protein, 217 aa, Artificial Sequence
  Synthetic Construct
APELLGGPSVFLFPPKPKDTLMISRTPEVTCVVVDVSDMWEYVKFNWYVDGVEVHNAKTKPWVKQLNSTWRVVSVLTVLHQDWLNGKEYKCKVSNKALPAPIEKTISKAKGQPREPQVYTLPPSRDELTKNQVSLTCLVKGFYPSDIAVEWESNGQPENNYKTTPPVLDSDGSFFLYSKLTVDKSRWQQGNVFSCSVMHEALHNHYTQKSLSLSPGK

SEQ ID NO: 204 - protein, 217 aa, Artificial Sequence
  Synthetic Construct
APELLGGPSVFLFPPKPKDTLMISRTPEVTCVVVDVSDDWTWVKFNWYVDGVEVHNAKTKPWIAQPNSTWRVVSVLTVLHQDWLNGKEYKCKVSNKALPAPIEKTISKAKGQPREPQVYTLPPSRDELTKNQVSLTCLVKGFYPSDIAVEWESNGQPENNYKTTPPVLDSDGSFFLYSKLTVDKSRWQQGNVFSCSVMHEALHNHYTQKSLSLSPGK

SEQ ID NO: 205 - protein, 217 aa, Artificial Sequence
  Synthetic Construct
APELLGGPSVFLFPPKPKDTLMISRTPEVTCVVVDVSDDWEWVKFNWYVDGVEVHNAKTKPWKLQLNSTWRVVSVLTVLHQDWLNGKEYKCKVSNKALPAPIEKTISKAKGQPREPQVYTLPPSRDELTKNQVSLTCLVKGFYPSDIAVEWESNGQPENNYKTTPPVLDSDGSFFLYSKLTVDKSRWQQGNVFSCSVMHEALHNHYTQKSLSLSPGK

SEQ ID NO: 206 - protein, 217 aa, Artificial Sequence
  Synthetic Construct
APELLGGPSVFLFPPKPKDTLMISRTPEVTCVVVDVSHEDPWVWFYWYVDGVEVHNAKTKPREEQYNSTYRVVSVLTVLHQDWLNGKEYKCSVVNIALWWSIEKTISKAKGQPREPQVYTLPPSRDELTKNQVSLTCLVKGFYPSDIAVEWESNGQPENNYKTTPPVLDSDGSFFLYSKLTVDKSRWQQGNVFSCSVMHEALHNHYTQKSLSLSPGK

SEQ ID NO: 207 - protein, 217 aa, Artificial Sequence
  Synthetic Construct
APELLGGPSVFLFPPKPKDTLMISRTPEVTCVVVDVSHEDPVVGFRWYVDGVEVHNAKTKPREEQYNSTYRVVSVLTVLHQDWLNGKEYKCRVSNSALTWKIEKTISKAKGQPREPQVYTLPPSRDELTKNQVSLTCLVKGFYPSDIAVEWESNGQPENNYKTTPPVLDSDGSFFLYSKLTVDKSRWQQGNVFSCSVMHEALHNHYTQKSLSLSPGK

SEQ ID NO: 208 - protein, 217 aa, Artificial Sequence
  Synthetic Construct
APELLGGPSVFLFPPKPKDTLMISRTPEVTCVVVDVSHEDPVVGFRWYVDGVEVHNAKTKPREEQYNSTYRVVSVLTVLHQDWLNGKEYKCRVSNSALSWRIEKTISKAKGQPREPQVYTLPPSRDELTKNQVSLTCLVKGFYPSDIAVEWESNGQPENNYKTTPPVLDSDGSFFLYSKLTVDKSRWQQGNVFSCSVMHEALHNHYTQKSLSLSPGK

SEQ ID NO: 209 - protein, 217 aa, Artificial Sequence
  Synthetic Construct
APELLGGPSVFLFPPKPKDTLMISRTPEVTCVVVDVSHEDPIVGFRWYVDGVEVHNAKTKPREEQYNSTYRVVSVLTVLHQDWLNGKEYKCRVSNSALRWRIEKTISKAKGQPREPQVYTLPPSRDELTKNQVSLTCLVKGFYPSDIAVEWESNGQPENNYKTTPPVLDSDGSFFLYSKLTVDKSRWQQGNVFSCSVMHEALHNHYTQKSLSLSPGK

SEQ ID NO: 210 - protein, 217 aa, Artificial Sequence
  Synthetic Construct
APELLGGPSVFLFPPKPKDTLMISRTPEVTCVVVDVSHEDPAVGFEWYVDGVEVHNAKTKPREEQYNSTYRVVSVLTVLHQDWLNGKEYKCQVFNWALDWVIEKTISKAKGQPREPQVYTLPPSRDELTKNQVSLTCLVKGFYPSDIAVEWESNGQPENNYKTTPPVLDSDGSFFLYSKLTVDKSRWQQGNVFSCSVMHEALHNHYTQKSLSLSPGK

SEQ ID NO: 211 - protein, 217 aa, Artificial Sequence
  Synthetic Construct
APELLGGPSVFLFPPKPKDTLMISRTPEVTCVVVDVSHEDPEVKFNWYVDGVEVHNAKTKPREEQYNSTYRVVSVLTVLHQDWLNGKEYKCKVSNKALPAPIEKTISKAKGQPREPQVYTLPPSRDELTKNQVSLSCAVKGFYPSDIAVEWESNGQPENNYKTTPPVLDSDGSFFLVSKLTVDKSRWQQGNVFSCSVMHEALHNHYTQKSLSLSPGK

SEQ ID NO: 212 - protein, 217 aa, Artificial Sequence
  Synthetic Construct
APEAAGGPSVFLFPPKPKDTLMISRTPEVTCVVVDVSHEDPEVKFNWYVDGVEVHNAKTKPREEQYNSTYRVVSVLTVLHQDWLNGKEYKCKVSNKALPAPIEKTISKAKGQPREPQVYTLPPSRDELTKNQVSLSCAVKGFYPSDIAVEWESNGQPENNYKTTPPVLDSDGSFFLVSKLTVDKSRWQQGNVFSCSVMHEALHNHYTQKSLSLSPGK

SEQ ID NO: 213 - protein, 217 aa, Artificial Sequence
  Synthetic Construct
APELLGGPSVFLFPPKPKDTLYITREPEVTCVVVDVSHEDPEVKFNWYVDGVEVHNAKTKPREEQYNSTYRVVSVLTVLHQDWLNGKEYKCKVSNKALPAPIEKTISKAKGQPREPQVYTLPPSRDELTKNQVSLSCAVKGFYPSDIAVEWESNGQPENNYKTTPPVLDSDGSFFLVSKLTVDKSRWQQGNVFSCSVMHEALHNHYTQKSLSLSPGK

SEQ ID NO: 214 - protein, 217 aa, Artificial Sequence
  Synthetic Construct
APEAAGGPSVFLFPPKPKDTLYITREPEVTCVVVDVSHEDPEVKFNWYVDGVEVHNAKTKPREEQYNSTYRVVSVLTVLHQDWLNGKEYKCKVSNKALPAPIEKTISKAKGQPREPQVYTLPPSRDELTKNQVSLSCAVKGFYPSDIAVEWESNGQPENNYKTTPPVLDSDGSFFLVSKLTVDKSRWQQGNVFSCSVMHEALHNHYTQKSLSLSPGK

SEQ ID NO: 215 - protein, 217 aa, Artificial Sequence
  Synthetic Construct
APELLGGPSVFLFPPKPKDTLMISRTPEVTCVVVDVSHEDPEVKFNWYVDGVEVHNAKTKPREEQYNSTYRVVSVLTVLHQDWLNGKEYKCKVSNKALPAPIEKTISKAKGQPREPQVYTLPPSRDELTKNQVSLWCLVKGFYPSDIAVEWESNGQPENNYKTTPPVLDSDGSFFLYSKLTVDKSRWQQGNVFSCSVMHEALHNHYTQKSLSLSPGK

SEQ ID NO: 216 - protein, 217 aa, Artificial Sequence
  Synthetic Construct
APEAAGGPSVFLFPPKPKDTLMISRTPEVTCVVVDVSHEDPEVKFNWYVDGVEVHNAKTKPREEQYNSTYRVVSVLTVLHQDWLNGKEYKCKVSNKALPAPIEKTISKAKGQPREPQVYTLPPSRDELTKNQVSLWCLVKGFYPSDIAVEWESNGQPENNYKTTPPVLDSDGSFFLYSKLTVDKSRWQQGNVFSCSVMHEALHNHYTQKSLSLSPGK

SEQ ID NO: 217 - protein, 217 aa, Artificial Sequence
  Synthetic Construct
APELLGGPSVFLFPPKPKDTLYITREPEVTCVVVDVSHEDPEVKFNWYVDGVEVHNAKTKPREEQYNSTYRVVSVLTVLHQDWLNGKEYKCKVSNKALPAPIEKTISKAKGQPREPQVYTLPPSRDELTKNQVSLWCLVKGFYPSDIAVEWESNGQPENNYKTTPPVLDSDGSFFLYSKLTVDKSRWQQGNVFSCSVMHEALHNHYTQKSLSLSPGK

SEQ ID NO: 218 - protein, 217 aa, Artificial Sequence
  Synthetic Construct
APEAAGGPSVFLFPPKPKDTLYITREPEVTCVVVDVSHEDPEVKFNWYVDGVEVHNAKTKPREEQYNSTYRVVSVLTVLHQDWLNGKEYKCKVSNKALPAPIEKTISKAKGQPREPQVYTLPPSRDELTKNQVSLWCLVKGFYPSDIAVEWESNGQPENNYKTTPPVLDSDGSFFLYSKLTVDKSRWQQGNVFSCSVMHEALHNHYTQKSLSLSPGK

SEQ ID NO: 219 - protein, 217 aa, Artificial Sequence
  Synthetic Construct
APELLGGPSVFLFPPKPKDTLMISRTPEVTCVVVDVSHEDPEVKFNWYVDGVEVHNAKTKPREEQYNSTYRVVSVLTVLHQDWLNGKEYKCKVSNKALPAPIEKTISKAKGQPREPQVYTLPPSRDELTKNQVSLWCLVKGFYPSDIAVWWESYGTEWSSYKTTPPVLDSDGSFFLYSKLTVTKEEWQQGFVFSCSVMHEALHNHYTQKSLSLSPGK

SEQ ID NO: 220 - protein, 217 aa, Artificial Sequence
  Synthetic Construct
APEAAGGPSVFLFPPKPKDTLMISRTPEVTCVVVDVSHEDPEVKFNWYVDGVEVHNAKTKPREEQYNSTYRVVSVLTVLHQDWLNGKEYKCKVSNKALPAPIEKTISKAKGQPREPQVYTLPPSRDELTKNQVSLWCLVKGFYPSDIAVWWESYGTEWSSYKTTPPVLDSDGSFFLYSKLTVTKEEWQQGFVFSCSVMHEALHNHYTQKSLSLSPGK

SEQ ID NO: 221 - protein, 217 aa, Artificial Sequence
  Synthetic Construct
APELLGGPSVFLFPPKPKDTLYITREPEVTCVVVDVSHEDPEVKFNWYVDGVEVHNAKTKPREEQYNSTYRVVSVLTVLHQDWLNGKEYKCKVSNKALPAPIEKTISKAKGQPREPQVYTLPPSRDELTKNQVSLWCLVKGFYPSDIAVWWESYGTEWSSYKTTPPVLDSDGSFFLYSKLTVTKEEWQQGFVFSCSVMHEALHNHYTQKSLSLSPGK

SEQ ID NO: 222 - protein, 217 aa, Artificial Sequence
  Synthetic Construct
APEAAGGPSVFLFPPKPKDTLYITREPEVTCVVVDVSHEDPEVKFNWYVDGVEVHNAKTKPREEQYNSTYRVVSVLTVLHQDWLNGKEYKCKVSNKALPAPIEKTISKAKGQPREPQVYTLPPSRDELTKNQVSLWCLVKGFYPSDIAVWWESYGTEWSSYKTTPPVLDSDGSFFLYSKLTVTKEEWQQGFVFSCSVMHEALHNHYTQKSLSLSPGK

SEQ ID NO: 223 - protein, 217 aa, Artificial Sequence
  Synthetic Construct
APELLGGPSVFLFPPKPKDTLMISRTPEVTCVVVDVSHEDPEVKFNWYVDGVEVHNAKTKPREEQYNSTYRVVSVLTVLHQDWLNGKEYKCKVSNKALPAPIEKTISKAKGQPREPQVYTLPPSRDELTKNQVSLSCAVKGFYPSDIAVWWESYGTEWSSYKTTPPVLDSDGSFFLVSKLTVTKEEWQQGFVFSCSVMHEALHNHYTQKSLSLSPGK

SEQ ID NO: 224 - protein, 217 aa, Artificial Sequence
  Synthetic Construct
APEAAGGPSVFLFPPKPKDTLMISRTPEVTCVVVDVSHEDPEVKFNWYVDGVEVHNAKTKPREEQYNSTYRVVSVLTVLHQDWLNGKEYKCKVSNKALPAPIEKTISKAKGQPREPQVYTLPPSRDELTKNQVSLSCAVKGFYPSDIAVWWESYGTEWSSYKTTPPVLDSDGSFFLVSKLTVTKEEWQQGFVFSCSVMHEALHNHYTQKSLSLSPGK

SEQ ID NO: 225 - protein, 217 aa, Artificial Sequence
  Synthetic Construct
APELLGGPSVFLFPPKPKDTLYITREPEVTCVVVDVSHEDPEVKFNWYVDGVEVHNAKTKPREEQYNSTYRVVSVLTVLHQDWLNGKEYKCKVSNKALPAPIEKTISKAKGQPREPQVYTLPPSRDELTKNQVSLSCAVKGFYPSDIAVWWESYGTEWSSYKTTPPVLDSDGSFFLVSKLTVTKEEWQQGFVFSCSVMHEALHNHYTQKSLSLSPGK

SEQ ID NO: 226 - protein, 217 aa, Artificial Sequence
  Synthetic Construct
APEAAGGPSVFLFPPKPKDTLYITREPEVTCVVVDVSHEDPEVKFNWYVDGVEVHNAKTKPREEQYNSTYRVVSVLTVLHQDWLNGKEYKCKVSNKALPAPIEKTISKAKGQPREPQVYTLPPSRDELTKNQVSLSCAVKGFYPSDIAVWWESYGTEWSSYKTTPPVLDSDGSFFLVSKLTVTKEEWQQGFVFSCSVMHEALHNHYTQKSLSLSPGK

SEQ ID NO: 227 - protein, 217 aa, Artificial Sequence
  Synthetic Construct
APELLGGPSVFLFPPKPKDTLMISRTPEVTCVVVDVSHEDPEVKFNWYVDGVEVHNAKTKPREEQYNSTYRVVSVLTVLHQDWLNGKEYKCKVSNKALPAPIEKTISKAKGQPREPQVYTLPPSRDELTKNQVSLWCLVKGFYPSDIAVEWESFGTEWSSYKTTPPVLDSDGSFFLYSKLTVTKEEWQQGFVFSCSVMHEALHNHYTQKSLSLSPGK

SEQ ID NO: 228 - protein, 217 aa, Artificial Sequence
  Synthetic Construct
APEAAGGPSVFLFPPKPKDTLMISRTPEVTCVVVDVSHEDPEVKFNWYVDGVEVHNAKTKPREEQYNSTYRVVSVLTVLHQDWLNGKEYKCKVSNKALPAPIEKTISKAKGQPREPQVYTLPPSRDELTKNQVSLWCLVKGFYPSDIAVEWESFGTEWSSYKTTPPVLDSDGSFFLYSKLTVTKEEWQQGFVFSCSVMHEALHNHYTQKSLSLSPGK

SEQ ID NO: 229 - protein, 217 aa, Artificial Sequence
  Synthetic Construct
APEAAGGPSVFLFPPKPKDTLMISRTPEVTCVVVDVSHEDPEVKFNWYVDGVEVHNAKTKPREEQYNSTYRVVSVLTVLHQDWLNGKEYKCKVSNKALGAPIEKTISKAKGQPREPQVYTLPPSRDELTKNQVSLWCLVKGFYPSDIAVEWESFGTEWSSYKTTPPVLDSDGSFFLYSKLTVTKEEWQQGFVFSCSVMHEALHNHYTQKSLSLSPGK

SEQ ID NO: 230 - protein, 217 aa, Artificial Sequence
  Synthetic Construct
APELLGGPSVFLFPPKPKDTLYITREPEVTCVVVDVSHEDPEVKFNWYVDGVEVHNAKTKPREEQYNSTYRVVSVLTVLHQDWLNGKEYKCKVSNKALPAPIEKTISKAKGQPREPQVYTLPPSRDELTKNQVSLWCLVKGFYPSDIAVEWESFGTEWSSYKTTPPVLDSDGSFFLYSKLTVTKEEWQQGFVFSCSVMHEALHNHYTQKSLSLSPGK

SEQ ID NO: 231 - protein, 217 aa, Artificial Sequence
  Synthetic Construct
APEAAGGPSVFLFPPKPKDTLYITREPEVTCVVVDVSHEDPEVKFNWYVDGVEVHNAKTKPREEQYNSTYRVVSVLTVLHQDWLNGKEYKCKVSNKALPAPIEKTISKAKGQPREPQVYTLPPSRDELTKNQVSLWCLVKGFYPSDIAVEWESFGTEWSSYKTTPPVLDSDGSFFLYSKLTVTKEEWQQGFVFSCSVMHEALHNHYTQKSLSLSPGK

SEQ ID NO: 232 - protein, 217 aa, Artificial Sequence
  Synthetic Construct
APEAAGGPSVFLFPPKPKDTLYITREPEVTCVVVDVSHEDPEVKFNWYVDGVEVHNAKTKPREEQYNSTYRVVSVLTVLHQDWLNGKEYKCKVSNKALGAPIEKTISKAKGQPREPQVYTLPPSRDELTKNQVSLWCLVKGFYPSDIAVEWESFGTEWSSYKTTPPVLDSDGSFFLYSKLTVTKEEWQQGFVFSCSVMHEALHNHYTQKSLSLSPGK

SEQ ID NO: 233 - protein, 217 aa, Artificial Sequence
  Synthetic Construct
APELLGGPSVFLFPPKPKDTLMISRTPEVTCVVVDVSHEDPEVKFNWYVDGVEVHNAKTKPREEQYNSTYRVVSVLTVLHQDWLNGKEYKCKVSNKALPAPIEKTISKAKGQPREPQVYTLPPSRDELTKNQVSLSCAVKGFYPSDIAVEWESFGTEWSSYKTTPPVLDSDGSFFLVSKLTVTKEEWQQGFVFSCSVMHEALHNHYTQKSLSLSPGK

SEQ ID NO: 234 - protein, 217 aa, Artificial Sequence
  Synthetic Construct
APEAAGGPSVFLFPPKPKDTLMISRTPEVTCVVVDVSHEDPEVKFNWYVDGVEVHNAKTKPREEQYNSTYRVVSVLTVLHQDWLNGKEYKCKVSNKALPAPIEKTISKAKGQPREPQVYTLPPSRDELTKNQVSLSCAVKGFYPSDIAVEWESFGTEWSSYKTTPPVLDSDGSFFLVSKLTVTKEEWQQGFVFSCSVMHEALHNHYTQKSLSLSPGK

SEQ ID NO: 235 - protein, 217 aa, Artificial Sequence
  Synthetic Construct
APEAAGGPSVFLFPPKPKDTLMISRTPEVTCVVVDVSHEDPEVKFNWYVDGVEVHNAKTKPREEQYNSTYRVVSVLTVLHQDWLNGKEYKCKVSNKALGAPIEKTISKAKGQPREPQVYTLPPSRDELTKNQVSLSCAVKGFYPSDIAVEWESFGTEWSSYKTTPPVLDSDGSFFLVSKLTVTKEEWQQGFVFSCSVMHEALHNHYTQKSLSLSPGK

SEQ ID NO: 236 - protein, 217 aa, Artificial Sequence
  Synthetic Construct
APELLGGPSVFLFPPKPKDTLYITREPEVTCVVVDVSHEDPEVKFNWYVDGVEVHNAKTKPREEQYNSTYRVVSVLTVLHQDWLNGKEYKCKVSNKALPAPIEKTISKAKGQPREPQVYTLPPSRDELTKNQVSLSCAVKGFYPSDIAVEWESFGTEWSSYKTTPPVLDSDGSFFLVSKLTVTKEEWQQGFVFSCSVMHEALHNHYTQKSLSLSPGK

SEQ ID NO: 237 - protein, 217 aa, Artificial Sequence
  Synthetic Construct
APEAAGGPSVFLFPPKPKDTLYITREPEVTCVVVDVSHEDPEVKFNWYVDGVEVHNAKTKPREEQYNSTYRVVSVLTVLHQDWLNGKEYKCKVSNKALPAPIEKTISKAKGQPREPQVYTLPPSRDELTKNQVSLSCAVKGFYPSDIAVEWESFGTEWSSYKTTPPVLDSDGSFFLVSKLTVTKEEWQQGFVFSCSVMHEALHNHYTQKSLSLSPGK

SEQ ID NO: 238 - protein, 217 aa, Artificial Sequence
  Synthetic Construct
APEAAGGPSVFLFPPKPKDTLYITREPEVTCVVVDVSHEDPEVKFNWYVDGVEVHNAKTKPREEQYNSTYRVVSVLTVLHQDWLNGKEYKCKVSNKALGAPIEKTISKAKGQPREPQVYTLPPSRDELTKNQVSLSCAVKGFYPSDIAVEWESFGTEWSSYKTTPPVLDSDGSFFLVSKLTVTKEEWQQGFVFSCSVMHEALHNHYTQKSLSLSPGK

SEQ ID NO: 239 - protein, 217 aa, Artificial Sequence
  Synthetic Construct
APELLGGPSVFLFPPKPKDTLMISRTPEVTCVVVDVSHEDPEVKFNWYVDGVEVHNAKTKPREEQYNSTYRVVSVLTVLHQDWLNGKEYKCKVSNKALPAPIEKTISKAKGQPREPQVYTLPPSRDELTKNQVSLWCLVKGFYPSDIAVEWESYGTEWANYKTTPPVLDSDGSFFLYSKLTVTKEEWQQGFVFSCSVMHEALHNHYTQKSLSLSPGK

SEQ ID NO: 240 - protein, 217 aa, Artificial Sequence
  Synthetic Construct
APEAAGGPSVFLFPPKPKDTLMISRTPEVTCVVVDVSHEDPEVKFNWYVDGVEVHNAKTKPREEQYNSTYRVVSVLTVLHQDWLNGKEYKCKVSNKALPAPIEKTISKAKGQPREPQVYTLPPSRDELTKNQVSLWCLVKGFYPSDIAVEWESYGTEWANYKTTPPVLDSDGSFFLYSKLTVTKEEWQQGFVFSCSVMHEALHNHYTQKSLSLSPGK

SEQ ID NO: 241 - protein, 217 aa, Artificial Sequence
  Synthetic Construct
APEAAGGPSVFLFPPKPKDTLMISRTPEVTCVVVDVSHEDPEVKFNWYVDGVEVHNAKTKPREEQYNSTYRVVSVLTVLHQDWLNGKEYKCKVSNKALGAPIEKTISKAKGQPREPQVYTLPPSRDELTKNQVSLWCLVKGFYPSDIAVEWESYGTEWANYKTTPPVLDSDGSFFLYSKLTVTKEEWQQGFVFSCSVMHEALHNHYTQKSLSLSPGK

SEQ ID NO: 242 - protein, 217 aa, Artificial Sequence
  Synthetic Construct
APELLGGPSVFLFPPKPKDTLYITREPEVTCVVVDVSHEDPEVKFNWYVDGVEVHNAKTKPREEQYNSTYRVVSVLTVLHQDWLNGKEYKCKVSNKALPAPIEKTISKAKGQPREPQVYTLPPSRDELTKNQVSLWCLVKGFYPSDIAVEWESYGTEWANYKTTPPVLDSDGSFFLYSKLTVTKEEWQQGFVFSCSVMHEALHNHYTQKSLSLSPGK

SEQ ID NO: 243 - protein, 217 aa, Artificial Sequence
  Synthetic Construct
APEAAGGPSVFLFPPKPKDTLYITREPEVTCVVVDVSHEDPEVKFNWYVDGVEVHNAKTKPREEQYNSTYRVVSVLTVLHQDWLNGKEYKCKVSNKALPAPIEKTISKAKGQPREPQVYTLPPSRDELTKNQVSLWCLVKGFYPSDIAVEWESYGTEWANYKTTPPVLDSDGSFFLYSKLTVTKEEWQQGFVFSCSVMHEALHNHYTQKSLSLSPGK

SEQ ID NO: 244 - protein, 217 aa, Artificial Sequence
  Synthetic Construct
APEAAGGPSVFLFPPKPKDTLYITREPEVTCVVVDVSHEDPEVKFNWYVDGVEVHNAKTKPREEQYNSTYRVVSVLTVLHQDWLNGKEYKCKVSNKALGAPIEKTISKAKGQPREPQVYTLPPSRDELTKNQVSLWCLVKGFYPSDIAVEWESYGTEWANYKTTPPVLDSDGSFFLYSKLTVTKEEWQQGFVFSCSVMHEALHNHYTQKSLSLSPGK

SEQ ID NO: 245 - protein, 217 aa, Artificial Sequence
  Synthetic Construct
APELLGGPSVFLFPPKPKDTLMISRTPEVTCVVVDVSHEDPEVKFNWYVDGVEVHNAKTKPREEQYNSTYRVVSVLTVLHQDWLNGKEYKCKVSNKALPAPIEKTISKAKGQPREPQVYTLPPSRDELTKNQVSLSCAVKGFYPSDIAVEWESYGTEWANYKTTPPVLDSDGSFFLVSKLTVTKEEWQQGFVFSCSVMHEALHNHYTQKSLSLSPGK

SEQ ID NO: 246 - protein, 217 aa, Artificial Sequence
  Synthetic Construct
APEAAGGPSVFLFPPKPKDTLMISRTPEVTCVVVDVSHEDPEVKFNWYVDGVEVHNAKTKPREEQYNSTYRVVSVLTVLHQDWLNGKEYKCKVSNKALPAPIEKTISKAKGQPREPQVYTLPPSRDELTKNQVSLSCAVKGFYPSDIAVEWESYGTEWANYKTTPPVLDSDGSFFLVSKLTVTKEEWQQGFVFSCSVMHEALHNHYTQKSLSLSPGK

SEQ ID NO: 247 - protein, 217 aa, Artificial Sequence
  Synthetic Construct
APEAAGGPSVFLFPPKPKDTLMISRTPEVTCVVVDVSHEDPEVKFNWYVDGVEVHNAKTKPREEQYNSTYRVVSVLTVLHQDWLNGKEYKCKVSNKALGAPIEKTISKAKGQPREPQVYTLPPSRDELTKNQVSLSCAVKGFYPSDIAVEWESYGTEWANYKTTPPVLDSDGSFFLVSKLTVTKEEWQQGFVFSCSVMHEALHNHYTQKSLSLSPGK

SEQ ID NO: 248 - protein, 217 aa, Artificial Sequence
  Synthetic Construct
APELLGGPSVFLFPPKPKDTLYITREPEVTCVVVDVSHEDPEVKFNWYVDGVEVHNAKTKPREEQYNSTYRVVSVLTVLHQDWLNGKEYKCKVSNKALPAPIEKTISKAKGQPREPQVYTLPPSRDELTKNQVSLSCAVKGFYPSDIAVEWESYGTEWANYKTTPPVLDSDGSFFLVSKLTVTKEEWQQGFVFSCSVMHEALHNHYTQKSLSLSPGK

SEQ ID NO: 249 - protein, 217 aa, Artificial Sequence
  Synthetic Construct
APEAAGGPSVFLFPPKPKDTLYITREPEVTCVVVDVSHEDPEVKFNWYVDGVEVHNAKTKPREEQYNSTYRVVSVLTVLHQDWLNGKEYKCKVSNKALPAPIEKTISKAKGQPREPQVYTLPPSRDELTKNQVSLSCAVKGFYPSDIAVEWESYGTEWANYKTTPPVLDSDGSFFLVSKLTVTKEEWQQGFVFSCSVMHEALHNHYTQKSLSLSPGK

SEQ ID NO: 250 - protein, 217 aa, Artificial Sequence
  Synthetic Construct
APEAAGGPSVFLFPPKPKDTLYITREPEVTCVVVDVSHEDPEVKFNWYVDGVEVHNAKTKPREEQYNSTYRVVSVLTVLHQDWLNGKEYKCKVSNKALGAPIEKTISKAKGQPREPQVYTLPPSRDELTKNQVSLSCAVKGFYPSDIAVEWESYGTEWANYKTTPPVLDSDGSFFLVSKLTVTKEEWQQGFVFSCSVMHEALHNHYTQKSLSLSPGK

SEQ ID NO: 251 - protein, 217 aa, Artificial Sequence
  Synthetic Construct
APELLGGPSVFLFPPKPKDTLMISRTPEVTCVVVDVSHEDPEVKFNWYVDGVEVHNAKTKPREEQYNSTYRVVSVLTVLHQDWLNGKEYKCKVSNKALPAPIEKTISKAKGQPREPQVYTLPPSRDELTKNQVSLWCLVKGFYPSDIAVEWESYGTEWVNYKTTPPVLDSDGSFFLYSKLTVTKEEWQQGFVFSCSVMHEALHNHYTQKSLSLSPGK

SEQ ID NO: 252 - protein, 217 aa, Artificial Sequence
  Synthetic Construct
APEAAGGPSVFLFPPKPKDTLMISRTPEVTCVVVDVSHEDPEVKFNWYVDGVEVHNAKTKPREEQYNSTYRVVSVLTVLHQDWLNGKEYKCKVSNKALPAPIEKTISKAKGQPREPQVYTLPPSRDELTKNQVSLWCLVKGFYPSDIAVEWESYGTEWVNYKTTPPVLDSDGSFFLYSKLTVTKEEWQQGFVFSCSVMHEALHNHYTQKSLSLSPGK

SEQ ID NO: 253 - protein, 217 aa, Artificial Sequence
  Synthetic Construct
APEAAGGPSVFLFPPKPKDTLMISRTPEVTCVVVDVSHEDPEVKFNWYVDGVEVHNAKTKPREEQYNSTYRVVSVLTVLHQDWLNGKEYKCKVSNKALGAPIEKTISKAKGQPREPQVYTLPPSRDELTKNQVSLWCLVKGFYPSDIAVEWESYGTEWVNYKTTPPVLDSDGSFFLYSKLTVTKEEWQQGFVFSCSVMHEALHNHYTQKSLSLSPGK

SEQ ID NO: 254 - protein, 217 aa, Artificial Sequence
  Synthetic Construct
APELLGGPSVFLFPPKPKDTLYITREPEVTCVVVDVSHEDPEVKFNWYVDGVEVHNAKTKPREEQYNSTYRVVSVLTVLHQDWLNGKEYKCKVSNKALPAPIEKTISKAKGQPREPQVYTLPPSRDELTKNQVSLWCLVKGFYPSDIAVEWESYGTEWVNYKTTPPVLDSDGSFFLYSKLTVTKEEWQQGFVFSCSVMHEALHNHYTQKSLSLSPGK

SEQ ID NO: 255 - protein, 217 aa, Artificial Sequence
  Synthetic Construct
APEAAGGPSVFLFPPKPKDTLYITREPEVTCVVVDVSHEDPEVKFNWYVDGVEVHNAKTKPREEQYNSTYRVVSVLTVLHQDWLNGKEYKCKVSNKALPAPIEKTISKAKGQPREPQVYTLPPSRDELTKNQVSLWCLVKGFYPSDIAVEWESYGTEWVNYKTTPPVLDSDGSFFLYSKLTVTKEEWQQGFVFSCSVMHEALHNHYTQKSLSLSPGK

SEQ ID NO: 256 - protein, 217 aa, Artificial Sequence
  Synthetic Construct
APEAAGGPSVFLFPPKPKDTLYITREPEVTCVVVDVSHEDPEVKFNWYVDGVEVHNAKTKPREEQYNSTYRVVSVLTVLHQDWLNGKEYKCKVSNKALGAPIEKTISKAKGQPREPQVYTLPPSRDELTKNQVSLWCLVKGFYPSDIAVEWESYGTEWVNYKTTPPVLDSDGSFFLYSKLTVTKEEWQQGFVFSCSVMHEALHNHYTQKSLSLSPGK

SEQ ID NO: 257 - protein, 217 aa, Artificial Sequence
  Synthetic Construct
APELLGGPSVFLFPPKPKDTLMISRTPEVTCVVVDVSHEDPEVKFNWYVDGVEVHNAKTKPREEQYNSTYRVVSVLTVLHQDWLNGKEYKCKVSNKALPAPIEKTISKAKGQPREPQVYTLPPSRDELTKNQVSLSCAVKGFYPSDIAVEWESYGTEWVNYKTTPPVLDSDGSFFLVSKLTVTKEEWQQGFVFSCSVMHEALHNHYTQKSLSLSPGK

SEQ ID NO: 258 - protein, 217 aa, Artificial Sequence
  Synthetic Construct
APEAAGGPSVFLFPPKPKDTLMISRTPEVTCVVVDVSHEDPEVKFNWYVDGVEVHNAKTKPREEQYNSTYRVVSVLTVLHQDWLNGKEYKCKVSNKALPAPIEKTISKAKGQPREPQVYTLPPSRDELTKNQVSLSCAVKGFYPSDIAVEWESYGTEWVNYKTTPPVLDSDGSFFLVSKLTVTKEEWQQGFVFSCSVMHEALHNHYTQKSLSLSPGK

SEQ ID NO: 259 - protein, 217 aa, Artificial Sequence
  Synthetic Construct
APEAAGGPSVFLFPPKPKDTLMISRTPEVTCVVVDVSHEDPEVKFNWYVDGVEVHNAKTKPREEQYNSTYRVVSVLTVLHQDWLNGKEYKCKVSNKALGAPIEKTISKAKGQPREPQVYTLPPSRDELTKNQVSLSCAVKGFYPSDIAVEWESYGTEWVNYKTTPPVLDSDGSFFLVSKLTVTKEEWQQGFVFSCSVMHEALHNHYTQKSLSLSPGK

SEQ ID NO: 260 - protein, 217 aa, Artificial Sequence
  Synthetic Construct
APELLGGPSVFLFPPKPKDTLYITREPEVTCVVVDVSHEDPEVKFNWYVDGVEVHNAKTKPREEQYNSTYRVVSVLTVLHQDWLNGKEYKCKVSNKALPAPIEKTISKAKGQPREPQVYTLPPSRDELTKNQVSLSCAVKGFYPSDIAVEWESYGTEWVNYKTTPPVLDSDGSFFLVSKLTVTKEEWQQGFVFSCSVMHEALHNHYTQKSLSLSPGK

SEQ ID NO: 261 - protein, 217 aa, Artificial Sequence
  Synthetic Construct
APEAAGGPSVFLFPPKPKDTLYITREPEVTCVVVDVSHEDPEVKFNWYVDGVEVHNAKTKPREEQYNSTYRVVSVLTVLHQDWLNGKEYKCKVSNKALPAPIEKTISKAKGQPREPQVYTLPPSRDELTKNQVSLSCAVKGFYPSDIAVEWESYGTEWVNYKTTPPVLDSDGSFFLVSKLTVTKEEWQQGFVFSCSVMHEALHNHYTQKSLSLSPGK

SEQ ID NO: 262 - protein, 217 aa, Artificial Sequence
  Synthetic Construct
APEAAGGPSVFLFPPKPKDTLYITREPEVTCVVVDVSHEDPEVKFNWYVDGVEVHNAKTKPREEQYNSTYRVVSVLTVLHQDWLNGKEYKCKVSNKALGAPIEKTISKAKGQPREPQVYTLPPSRDELTKNQVSLSCAVKGFYPSDIAVEWESYGTEWVNYKTTPPVLDSDGSFFLVSKLTVTKEEWQQGFVFSCSVMHEALHNHYTQKSLSLSPGK

SEQ ID NO: 263 - protein, 217 aa, Artificial Sequence
  Synthetic Construct
APELLGGPSVFLFPPKPKDTLMISRTPEVTCVVVDVSHEDPEVKFNWYVDGVEVHNAKTKPREEQYNSTYRVVSVLTVLHQDWLNGKEYKCKVSNKALPAPIEKTISKAKGQPREPQVYTLPPSRDELTKNQVSLWCLVKGFYPSDIAVEWESYGTEWSNYKTTPPVLDSDGSFFLYSKLTVSKEEWQQGFVFSCSVMHEALHNHYTQKSLSLSPGK

SEQ ID NO: 264 - protein, 217 aa, Artificial Sequence
  Synthetic Construct
APEAAGGPSVFLFPPKPKDTLMISRTPEVTCVVVDVSHEDPEVKFNWYVDGVEVHNAKTKPREEQYNSTYRVVSVLTVLHQDWLNGKEYKCKVSNKALPAPIEKTISKAKGQPREPQVYTLPPSRDELTKNQVSLWCLVKGFYPSDIAVEWESYGTEWSNYKTTPPVLDSDGSFFLYSKLTVSKEEWQQGFVFSCSVMHEALHNHYTQKSLSLSPGK

SEQ ID NO: 265 - protein, 217 aa, Artificial Sequence
  Synthetic Construct
APEAAGGPSVFLFPPKPKDTLMISRTPEVTCVVVDVSHEDPEVKFNWYVDGVEVHNAKTKPREEQYNSTYRVVSVLTVLHQDWLNGKEYKCKVSNKALGAPIEKTISKAKGQPREPQVYTLPPSRDELTKNQVSLWCLVKGFYPSDIAVEWESYGTEWSNYKTTPPVLDSDGSFFLYSKLTVSKEEWQQGFVFSCSVMHEALHNHYTQKSLSLSPGK

SEQ ID NO: 266 - protein, 217 aa, Artificial Sequence
  Synthetic Construct
APELLGGPSVFLFPPKPKDTLYITREPEVTCVVVDVSHEDPEVKFNWYVDGVEVHNAKTKPREEQYNSTYRVVSVLTVLHQDWLNGKEYKCKVSNKALPAPIEKTISKAKGQPREPQVYTLPPSRDELTKNQVSLWCLVKGFYPSDIAVEWESYGTEWSNYKTTPPVLDSDGSFFLYSKLTVSKEEWQQGFVFSCSVMHEALHNHYTQKSLSLSPGK

SEQ ID NO: 267 - protein, 217 aa, Artificial Sequence
  Synthetic Construct
APEAAGGPSVFLFPPKPKDTLYITREPEVTCVVVDVSHEDPEVKFNWYVDGVEVHNAKTKPREEQYNSTYRVVSVLTVLHQDWLNGKEYKCKVSNKALPAPIEKTISKAKGQPREPQVYTLPPSRDELTKNQVSLWCLVKGFYPSDIAVEWESYGTEWSNYKTTPPVLDSDGSFFLYSKLTVSKEEWQQGFVFSCSVMHEALHNHYTQKSLSLSPGK

SEQ ID NO: 268 - protein, 217 aa, Artificial Sequence
  Synthetic Construct
APEAAGGPSVFLFPPKPKDTLYITREPEVTCVVVDVSHEDPEVKFNWYVDGVEVHNAKTKPREEQYNSTYRVVSVLTVLHQDWLNGKEYKCKVSNKALGAPIEKTISKAKGQPREPQVYTLPPSRDELTKNQVSLWCLVKGFYPSDIAVEWESYGTEWSNYKTTPPVLDSDGSFFLYSKLTVSKEEWQQGFVFSCSVMHEALHNHYTQKSLSLSPGK

SEQ ID NO: 269 - protein, 217 aa, Artificial Sequence
  Synthetic Construct
APELLGGPSVFLFPPKPKDTLMISRTPEVTCVVVDVSHEDPEVKFNWYVDGVEVHNAKTKPREEQYNSTYRVVSVLTVLHQDWLNGKEYKCKVSNKALPAPIEKTISKAKGQPREPQVYTLPPSRDELTKNQVSLSCAVKGFYPSDIAVEWESYGTEWSNYKTTPPVLDSDGSFFLVSKLTVSKEEWQQGFVFSCSVMHEALHNHYTQKSLSLSPGK

SEQ ID NO: 270 - protein, 217 aa, Artificial Sequence
  Synthetic Construct
APEAAGGPSVFLFPPKPKDTLMISRTPEVTCVVVDVSHEDPEVKFNWYVDGVEVHNAKTKPREEQYNSTYRVVSVLTVLHQDWLNGKEYKCKVSNKALPAPIEKTISKAKGQPREPQVYTLPPSRDELTKNQVSLSCAVKGFYPSDIAVEWESYGTEWSNYKTTPPVLDSDGSFFLVSKLTVSKEEWQQGFVFSCSVMHEALHNHYTQKSLSLSPGK

SEQ ID NO: 271 - protein, 217 aa, Artificial Sequence
  Synthetic Construct
APEAAGGPSVFLFPPKPKDTLMISRTPEVTCVVVDVSHEDPEVKFNWYVDGVEVHNAKTKPREEQYNSTYRVVSVLTVLHQDWLNGKEYKCKVSNKALGAPIEKTISKAKGQPREPQVYTLPPSRDELTKNQVSLSCAVKGFYPSDIAVEWESYGTEWSNYKTTPPVLDSDGSFFLVSKLTVSKEEWQQGFVFSCSVMHEALHNHYTQKSLSLSPGK

SEQ ID NO: 272 - protein, 217 aa, Artificial Sequence
  Synthetic Construct
APELLGGPSVFLFPPKPKDTLYITREPEVTCVVVDVSHEDPEVKFNWYVDGVEVHNAKTKPREEQYNSTYRVVSVLTVLHQDWLNGKEYKCKVSNKALPAPIEKTISKAKGQPREPQVYTLPPSRDELTKNQVSLSCAVKGFYPSDIAVEWESYGTEWSNYKTTPPVLDSDGSFFLVSKLTVSKEEWQQGFVFSCSVMHEALHNHYTQKSLSLSPGK

SEQ ID NO: 273 - protein, 217 aa, Artificial Sequence
  Synthetic Construct
APEAAGGPSVFLFPPKPKDTLYITREPEVTCVVVDVSHEDPEVKFNWYVDGVEVHNAKTKPREEQYNSTYRVVSVLTVLHQDWLNGKEYKCKVSNKALPAPIEKTISKAKGQPREPQVYTLPPSRDELTKNQVSLSCAVKGFYPSDIAVEWESYGTEWSNYKTTPPVLDSDGSFFLVSKLTVSKEEWQQGFVFSCSVMHEALHNHYTQKSLSLSPGK

SEQ ID NO: 274 - protein, 217 aa, Artificial Sequence
  Synthetic Construct
APEAAGGPSVFLFPPKPKDTLYITREPEVTCVVVDVSHEDPEVKFNWYVDGVEVHNAKTKPREEQYNSTYRVVSVLTVLHQDWLNGKEYKCKVSNKALGAPIEKTISKAKGQPREPQVYTLPPSRDELTKNQVSLSCAVKGFYPSDIAVEWESYGTEWSNYKTTPPVLDSDGSFFLVSKLTVSKEEWQQGFVFSCSVMHEALHNHYTQKSLSLSPGK

SEQ ID NO: 275 - protein, 217 aa, Artificial Sequence
  Synthetic Construct
APELLGGPSVFLFPPKPKDTLMISRTPEVTCVVVDVSHEDPEVKFNWYVDGVEVHNAKTKPREEQYNSTYRVVSVLTVLHQDWLNGKEYKCKVSNKALPAPIEKTISKAKGQPREPQVYTLPPSRDELTKNQVSLWCLVKGFYPSDIAVLWESYGTEWASYKTTPPVLDSDGSFFLYSKLTVTKEEWQQGFVFSCSVMHEALHNHYTQKSLSLSPGK

SEQ ID NO: 276 - protein, 217 aa, Artificial Sequence
  Synthetic Construct
APEAAGGPSVFLFPPKPKDTLMISRTPEVTCVVVDVSHEDPEVKFNWYVDGVEVHNAKTKPREEQYNSTYRVVSVLTVLHQDWLNGKEYKCKVSNKALPAPIEKTISKAKGQPREPQVYTLPPSRDELTKNQVSLWCLVKGFYPSDIAVLWESYGTEWASYKTTPPVLDSDGSFFLYSKLTVTKEEWQQGFVFSCSVMHEALHNHYTQKSLSLSPGK

SEQ ID NO: 277 - protein, 217 aa, Artificial Sequence
  Synthetic Construct
APEAAGGPSVFLFPPKPKDTLMISRTPEVTCVVVDVSHEDPEVKFNWYVDGVEVHNAKTKPREEQYNSTYRVVSVLTVLHQDWLNGKEYKCKVSNKALGAPIEKTISKAKGQPREPQVYTLPPSRDELTKNQVSLWCLVKGFYPSDIAVLWESYGTEWASYKTTPPVLDSDGSFFLYSKLTVTKEEWQQGFVFSCSVMHEALHNHYTQKSLSLSPGK

SEQ ID NO: 278 - protein, 217 aa, Artificial Sequence
  Synthetic Construct
APELLGGPSVFLFPPKPKDTLYITREPEVTCVVVDVSHEDPEVKFNWYVDGVEVHNAKTKPREEQYNSTYRVVSVLTVLHQDWLNGKEYKCKVSNKALPAPIEKTISKAKGQPREPQVYTLPPSRDELTKNQVSLWCLVKGFYPSDIAVLWESYGTEWASYKTTPPVLDSDGSFFLYSKLTVTKEEWQQGFVFSCSVMHEALHNHYTQKSLSLSPGK

SEQ ID NO: 279 - protein, 217 aa, Artificial Sequence
  Synthetic Construct
APEAAGGPSVFLFPPKPKDTLYITREPEVTCVVVDVSHEDPEVKFNWYVDGVEVHNAKTKPREEQYNSTYRVVSVLTVLHQDWLNGKEYKCKVSNKALPAPIEKTISKAKGQPREPQVYTLPPSRDELTKNQVSLWCLVKGFYPSDIAVLWESYGTEWASYKTTPPVLDSDGSFFLYSKLTVTKEEWQQGFVFSCSVMHEALHNHYTQKSLSLSPGK

SEQ ID NO: 280 - protein, 217 aa, Artificial Sequence
  Synthetic Construct
APEAAGGPSVFLFPPKPKDTLYITREPEVTCVVVDVSHEDPEVKFNWYVDGVEVHNAKTKPREEQYNSTYRVVSVLTVLHQDWLNGKEYKCKVSNKALGAPIEKTISKAKGQPREPQVYTLPPSRDELTKNQVSLWCLVKGFYPSDIAVLWESYGTEWASYKTTPPVLDSDGSFFLYSKLTVTKEEWQQGFVFSCSVMHEALHNHYTQKSLSLSPGK

SEQ ID NO: 281 - protein, 217 aa, Artificial Sequence
  Synthetic Construct
APELLGGPSVFLFPPKPKDTLMISRTPEVTCVVVDVSHEDPEVKFNWYVDGVEVHNAKTKPREEQYNSTYRVVSVLTVLHQDWLNGKEYKCKVSNKALPAPIEKTISKAKGQPREPQVYTLPPSRDELTKNQVSLSCAVKGFYPSDIAVLWESYGTEWASYKTTPPVLDSDGSFFLVSKLTVTKEEWQQGFVFSCSVMHEALHNHYTQKSLSLSPGK

SEQ ID NO: 282 - protein, 217 aa, Artificial Sequence
  Synthetic Construct
APEAAGGPSVFLFPPKPKDTLMISRTPEVTCVVVDVSHEDPEVKFNWYVDGVEVHNAKTKPREEQYNSTYRVVSVLTVLHQDWLNGKEYKCKVSNKALPAPIEKTISKAKGQPREPQVYTLPPSRDELTKNQVSLSCAVKGFYPSDIAVLWESYGTEWASYKTTPPVLDSDGSFFLVSKLTVTKEEWQQGFVFSCSVMHEALHNHYTQKSLSLSPGK

SEQ ID NO: 283 - protein, 217 aa, Artificial Sequence
  Synthetic Construct
APEAAGGPSVFLFPPKPKDTLMISRTPEVTCVVVDVSHEDPEVKFNWYVDGVEVHNAKTKPREEQYNSTYRVVSVLTVLHQDWLNGKEYKCKVSNKALGAPIEKTISKAKGQPREPQVYTLPPSRDELTKNQVSLSCAVKGFYPSDIAVLWESYGTEWASYKTTPPVLDSDGSFFLVSKLTVTKEEWQQGFVFSCSVMHEALHNHYTQKSLSLSPGK

SEQ ID NO: 284 - protein, 217 aa, Artificial Sequence
  Synthetic Construct
APELLGGPSVFLFPPKPKDTLYITREPEVTCVVVDVSHEDPEVKFNWYVDGVEVHNAKTKPREEQYNSTYRVVSVLTVLHQDWLNGKEYKCKVSNKALPAPIEKTISKAKGQPREPQVYTLPPSRDELTKNQVSLSCAVKGFYPSDIAVLWESYGTEWASYKTTPPVLDSDGSFFLVSKLTVTKEEWQQGFVFSCSVMHEALHNHYTQKSLSLSPGK

SEQ ID NO: 285 - protein, 217 aa, Artificial Sequence
  Synthetic Construct
APEAAGGPSVFLFPPKPKDTLYITREPEVTCVVVDVSHEDPEVKFNWYVDGVEVHNAKTKPREEQYNSTYRVVSVLTVLHQDWLNGKEYKCKVSNKALPAPIEKTISKAKGQPREPQVYTLPPSRDELTKNQVSLSCAVKGFYPSDIAVLWESYGTEWASYKTTPPVLDSDGSFFLVSKLTVTKEEWQQGFVFSCSVMHEALHNHYTQKSLSLSPGK

SEQ ID NO: 286 - protein, 217 aa, Artificial Sequence
  Synthetic Construct
APEAAGGPSVFLFPPKPKDTLYITREPEVTCVVVDVSHEDPEVKFNWYVDGVEVHNAKTKPREEQYNSTYRVVSVLTVLHQDWLNGKEYKCKVSNKALGAPIEKTISKAKGQPREPQVYTLPPSRDELTKNQVSLSCAVKGFYPSDIAVLWESYGTEWASYKTTPPVLDSDGSFFLVSKLTVTKEEWQQGFVFSCSVMHEALHNHYTQKSLSLSPGK

SEQ ID NO: 287 - protein, 217 aa, Artificial Sequence
  Synthetic Construct
APELLGGPSVFLFPPKPKDTLMISRTPEVTCVVVDVSHEDPEVKFNWYVDGVEVHNAKTKPREEQYNSTYRVVSVLTVLHQDWLNGKEYKCKVSNKALPAPIEKTISKAKGQPREPQVYTLPPSRDELTKNQVSLWCLVKGFYPSDIAVEWESYGTEWSNYKTTPPVLDSDGSFFLYSKLTVTKEEWQQGFVFSCSVMHEALHNHYTQKSLSLSPGK

SEQ ID NO: 288 - protein, 217 aa, Artificial Sequence
  Synthetic Construct
APEAAGGPSVFLFPPKPKDTLMISRTPEVTCVVVDVSHEDPEVKFNWYVDGVEVHNAKTKPREEQYNSTYRVVSVLTVLHQDWLNGKEYKCKVSNKALPAPIEKTISKAKGQPREPQVYTLPPSRDELTKNQVSLWCLVKGFYPSDIAVEWESYGTEWSNYKTTPPVLDSDGSFFLYSKLTVTKEEWQQGFVFSCSVMHEALHNHYTQKSLSLSPGK

SEQ ID NO: 289 - protein, 217 aa, Artificial Sequence
  Synthetic Construct
APEAAGGPSVFLFPPKPKDTLMISRTPEVTCVVVDVSHEDPEVKFNWYVDGVEVHNAKTKPREEQYNSTYRVVSVLTVLHQDWLNGKEYKCKVSNKALGAPIEKTISKAKGQPREPQVYTLPPSRDELTKNQVSLWCLVKGFYPSDIAVEWESYGTEWSNYKTTPPVLDSDGSFFLYSKLTVTKEEWQQGFVFSCSVMHEALHNHYTQKSLSLSPGK

SEQ ID NO: 290 - protein, 217 aa, Artificial Sequence
  Synthetic Construct
APELLGGPSVFLFPPKPKDTLYITREPEVTCVVVDVSHEDPEVKFNWYVDGVEVHNAKTKPREEQYNSTYRVVSVLTVLHQDWLNGKEYKCKVSNKALPAPIEKTISKAKGQPREPQVYTLPPSRDELTKNQVSLWCLVKGFYPSDIAVEWESYGTEWSNYKTTPPVLDSDGSFFLYSKLTVTKEEWQQGFVFSCSVMHEALHNHYTQKSLSLSPGK

SEQ ID NO: 291 - protein, 217 aa, Artificial Sequence
  Synthetic Construct
APEAAGGPSVFLFPPKPKDTLYITREPEVTCVVVDVSHEDPEVKFNWYVDGVEVHNAKTKPREEQYNSTYRVVSVLTVLHQDWLNGKEYKCKVSNKALPAPIEKTISKAKGQPREPQVYTLPPSRDELTKNQVSLWCLVKGFYPSDIAVEWESYGTEWSNYKTTPPVLDSDGSFFLYSKLTVTKEEWQQGFVFSCSVMHEALHNHYTQKSLSLSPGK

SEQ ID NO: 292 - protein, 217 aa, Artificial Sequence
  Synthetic Construct
APEAAGGPSVFLFPPKPKDTLYITREPEVTCVVVDVSHEDPEVKFNWYVDGVEVHNAKTKPREEQYNSTYRVVSVLTVLHQDWLNGKEYKCKVSNKALGAPIEKTISKAKGQPREPQVYTLPPSRDELTKNQVSLWCLVKGFYPSDIAVEWESYGTEWSNYKTTPPVLDSDGSFFLYSKLTVTKEEWQQGFVFSCSVMHEALHNHYTQKSLSLSPGK

SEQ ID NO: 293 - protein, 217 aa, Artificial Sequence
  Synthetic Construct
APELLGGPSVFLFPPKPKDTLMISRTPEVTCVVVDVSHEDPEVKFNWYVDGVEVHNAKTKPREEQYNSTYRVVSVLTVLHQDWLNGKEYKCKVSNKALPAPIEKTISKAKGQPREPQVYTLPPSRDELTKNQVSLSCAVKGFYPSDIAVEWESYGTEWSNYKTTPPVLDSDGSFFLVSKLTVTKEEWQQGFVFSCSVMHEALHNHYTQKSLSLSPGK

SEQ ID NO: 294 - protein, 217 aa, Artificial Sequence
  Synthetic Construct
APEAAGGPSVFLFPPKPKDTLMISRTPEVTCVVVDVSHEDPEVKFNWYVDGVEVHNAKTKPREEQYNSTYRVVSVLTVLHQDWLNGKEYKCKVSNKALPAPIEKTISKAKGQPREPQVYTLPPSRDELTKNQVSLSCAVKGFYPSDIAVEWESYGTEWSNYKTTPPVLDSDGSFFLVSKLTVTKEEWQQGFVFSCSVMHEALHNHYTQKSLSLSPGK

SEQ ID NO: 295 - protein, 217 aa, Artificial Sequence
  Synthetic Construct
APEAAGGPSVFLFPPKPKDTLMISRTPEVTCVVVDVSHEDPEVKFNWYVDGVEVHNAKTKPREEQYNSTYRVVSVLTVLHQDWLNGKEYKCKVSNKALGAPIEKTISKAKGQPREPQVYTLPPSRDELTKNQVSLSCAVKGFYPSDIAVEWESYGTEWSNYKTTPPVLDSDGSFFLVSKLTVTKEEWQQGFVFSCSVMHEALHNHYTQKSLSLSPGK

SEQ ID NO: 296 - protein, 217 aa, Artificial Sequence
  Synthetic Construct
APELLGGPSVFLFPPKPKDTLYITREPEVTCVVVDVSHEDPEVKFNWYVDGVEVHNAKTKPREEQYNSTYRVVSVLTVLHQDWLNGKEYKCKVSNKALPAPIEKTISKAKGQPREPQVYTLPPSRDELTKNQVSLSCAVKGFYPSDIAVEWESYGTEWSNYKTTPPVLDSDGSFFLVSKLTVTKEEWQQGFVFSCSVMHEALHNHYTQKSLSLSPGK

SEQ ID NO: 297 - protein, 217 aa, Artificial Sequence
  Synthetic Construct
APEAAGGPSVFLFPPKPKDTLYITREPEVTCVVVDVSHEDPEVKFNWYVDGVEVHNAKTKPREEQYNSTYRVVSVLTVLHQDWLNGKEYKCKVSNKALPAPIEKTISKAKGQPREPQVYTLPPSRDELTKNQVSLSCAVKGFYPSDIAVEWESYGTEWSNYKTTPPVLDSDGSFFLVSKLTVTKEEWQQGFVFSCSVMHEALHNHYTQKSLSLSPGK

SEQ ID NO: 298 - protein, 217 aa, Artificial Sequence
  Synthetic Construct
APEAAGGPSVFLFPPKPKDTLYITREPEVTCVVVDVSHEDPEVKFNWYVDGVEVHNAKTKPREEQYNSTYRVVSVLTVLHQDWLNGKEYKCKVSNKALGAPIEKTISKAKGQPREPQVYTLPPSRDELTKNQVSLSCAVKGFYPSDIAVEWESYGTEWSNYKTTPPVLDSDGSFFLVSKLTVTKEEWQQGFVFSCSVMHEALHNHYTQKSLSLSPGK

SEQ ID NO: 299 - protein, 7 aa, Artificial Sequence
  Synthetic Construct
  VARIANT (2)..(2): Xaa = any amino acid
YXTEWSS

SEQ ID NO: 300 - protein, 9 aa, Artificial Sequence
  Synthetic Construct
  VARIANT (2)..(3): Xaa = any amino acid
  VARIANT (5)..(8): Xaa = any amino acid
TXXEXXXXF

SEQ ID NO: 301 - protein, 20 aa, Artificial Sequence
  Synthetic Construct
GGACAGGGATCCAGAGTTCC

SEQ ID NO: 302 - protein, 20 aa, Artificial Sequence
  Synthetic Construct
AGCTGGGAAGGTGTGCACAC

SEQ ID NO: 303 - protein, 19 aa, Artificial Sequence
  Synthetic Construct
CAGGGGCCAGTGGATAGAC

SEQ ID NO: 304 - protein, 20 aa, Artificial Sequence
  Synthetic Construct
GACATTGATGTCTTTGGGGT

SEQ ID NO: 305 - protein, 20 aa, Artificial Sequence
  Synthetic Construct
TTCACTGCCATCAATCTTCC

SEQ ID NO: 306 - protein, 117 aa, Artificial Sequence
  Synthetic Construct
EVQLQQSGPELVKPGASVKMSCKASGYTFTDYNMHWVKQSHGKSLEWIGYINPNNGGTTYNQKFKGKATLTVNKSSSTAYMELRSLTSEDSAVYYCATYNNHYFDSWGQGTTLTVSS

SEQ ID NO: 307 - protein, 10 aa, Artificial Sequence
  Synthetic Construct
GYTFTDYNMH

SEQ ID NO: 308 - protein, 17 aa, Artificial Sequence
  Synthetic Construct
YINPNNGGTTYNQKFKG

SEQ ID NO: 309 - protein, 10 aa, Artificial Sequence
  Synthetic Construct
ATYNNHYFDS

SEQ ID NO: 310 - protein, 107 aa, Artificial Sequence
  Synthetic Construct
DIQMTQTTSSLSASLGDRVTISCSASQGISNYLNWYQQKPDGTVKLLIYYTSNLHSGVPSRFSGSGSGTDYSLTISNLEPEDIATYYCQQYSNLPYTFGGGTKLEIK

SEQ ID NO: 311 - protein, 11 aa, Artificial Sequence
  Synthetic Construct
SASQGISNYLN

SEQ ID NO: 312 - protein, 7 aa, Artificial Sequence
  Synthetic Construct
YTSNLHS

SEQ ID NO: 313 - protein, 9 aa, Artificial Sequence
  Synthetic Construct
QQYSNLPYT

SEQ ID NO: 314 - protein, 118 aa, Artificial Sequence
  Synthetic Construct
QVHLQQSGPEVVRPGVSVKISCKGSGYTFTDYGMHWVKQSHAKSLEWIGVISTYNGNTSYNQKYKGKATVTVDKPSSTAYMELVRLTSEDSAIYYCARDFGYVPFDYWGQGTTLTVSS

SEQ ID NO: 315 - protein, 10 aa, Artificial Sequence
  Synthetic Construct
GYTFTDYGMH

SEQ ID NO: 316 - protein, 17 aa, Artificial Sequence
  Synthetic Construct
VISTYNGNTSYNQKYKG

SEQ ID NO: 317 - protein, 11 aa, Artificial Sequence
  Synthetic Construct
ARDFGYVPFDY

SEQ ID NO: 318 - protein, 112 aa, Artificial Sequence
  Synthetic Construct
DVVMTQTPLTLSVTIGQPASISCKSSQSLLDSDGKTYLNWLLQRPGQSPKRLIYLVSYLDSGVPDRFTGSGSGTDFTLKISRVEADDLGVYYCWQGTHFPYTFGGGTKLEIK

SEQ ID NO: 319 - protein, 7 aa, Artificial Sequence
  Synthetic Construct
LVSYLDS

SEQ ID NO: 320 - protein, 11 aa, Artificial Sequence
  Synthetic Construct
  VARIANT (2)..(2): Xaa = Try or Phe
  VARIANT (3)..(3): Xaa = Thr, Asn, or Ser
  VARIANT (4)..(4): Xaa = Phe, Leu, or Ile
  VARIANT (5)..(5): Xaa = Thr, Ser, or Lys
  VARIANT (6)..(6): Xaa = Asp, Ser, or Glu
  VARIANT (7)..(7): Xaa = Asp or absent
  VARIANT (8)..(8): Xaa = His, Tyr, or Thr
  VARIANT (9)..(9): Xaa = Ala, Asn, Gly, Val, Trp, Thr or Tyr
  VARIANT (10)..(10): Xaa = Met, Ile, or Trp
  VARIANT (11)..(11): Xaa = His, Gln, or Asn
GXXXXXXXXXX

SEQ ID NO: 321 - protein, 11 aa, Artificial Sequence
  Synthetic Construct
  VARIANT (3)..(3): Xaa = Thr or Ser
  VARIANT (4)..(4): Xaa = Phe, Leu, or Ile
  VARIANT (5)..(5): Xaa = Thr or Ser
  VARIANT (6)..(6): Xaa = Asp, Ser, or Glu
  VARIANT (7)..(7): Xaa = Asp or absent
  VARIANT (8)..(8): Xaa = His or Tyr
  VARIANT (9)..(9): Xaa = Ala, Asn, Gly, Val, Trp, Tyr, or Ala
  VARIANT (9)..(9): Xaa = Ala, Asn, Gly, Val, Trp, Thr, or Ala
  VARIANT (10)..(10): Xaa = Met, Ile, or Trp
  VARIANT (11)..(11): Xaa = His, Gln, or Asn
GYXXXXXXXXX

SEQ ID NO: 322 - protein, 10 aa, Artificial Sequence
  Synthetic Construct
  VARIANT (2)..(2): Xaa = Tyr or Phe
  VARIANT (3)..(3): Xaa = Thr or Asn
  VARIANT (4)..(4): Xaa = Phe, Leu, or Ile
  VARIANT (5)..(5): Xaa = Thr, Ser, or Lys
  VARIANT (6)..(6): Xaa = Asp, Ser, or Glu
  VARIANT (7)..(7): Xaa = His, Tyr, or Thr
  VARIANT (8)..(8): Xaa = Ala, Asn, Gly, Val, Trp, Thr, Tyr, or Ala
  VARIANT (9)..(9): Xaa = Met or Ile
  VARIANT (10)..(10): Xaa = His or Gln
GXXXXXXXXX

SEQ ID NO: 323 - protein, 10 aa, Artificial Sequence
  Synthetic Construct
  VARIANT (4)..(4): Xaa = Phe or Leu
  VARIANT (5)..(5): Xaa = Thr or Ser
  VARIANT (6)..(6): Xaa = Asp, Ser, or Glu
  VARIANT (7)..(7): Xaa = His, Tyr
  VARIANT (7)..(7): Xaa = His or Tyr
  VARIANT (8)..(8): Xaa =  Ala, Asn, Gly, Val, Trp, or Thr
  VARIANT (9)..(9): Xaa =  Met or Ile
  VARIANT (10)..(10): Xaa =  His or Gln
GYTXXXXXXX

SEQ ID NO: 324 - protein, 17 aa, Artificial Sequence
  Synthetic Construct
  VARIANT (1)..(1): Xaa = Asp, Val, Tyr, Arg, Gly, or Thr
  VARIANT (2)..(2): Xaa = Ile, Ser, or Val
  VARIANT (3)..(3): Xaa = Leu, Ser, Asn, Asp, Ile, or Tyr
  VARIANT (4)..(4): Xaa = Pro, Thr, or absent
  VARIANT (5)..(5): Xaa = Ser, Tyr, Asn, Thr, Ala, Gly, or Phe
  VARIANT (6)..(6): Xaa = Ile, Ser, Asn, Thr, or Asp
  VARIANT (7)..(7): Xaa = Gly or Asp
  VARIANT (8)..(8): Xaa = Gly, Asp, Asn, Arg, or Ser
  VARIANT (9)..(9): Xaa = Arg, Thr, or Ala
  VARIANT (10)..(10): Xaa =  Ile, Gly, Ser, Lys, Thr, Asn, or Arg
  VARIANT (12)..(12): Xaa =  Gly, Asn, Asp, or Thr
  VARIANT (13)..(13): Xaa =  Val, Gln, Glu, or Pro
  VARIANT (14)..(14): Xaa =  Lys or Ser
  VARIANT (15)..(15): Xaa = Phe, Tyr or Leu
  VARIANT (16)..(16): Xaa = Lys, Arg, Gln, or is absent
  VARIANT (17)..(17): Xaa = Gly, Thr, Asp, Ser, or is absent
XXXXXXXXXXYXXXXXX

SEQ ID NO: 325 - protein, 17 aa, Artificial Sequence
  Synthetic Construct
  VARIANT (1)..(1): Xaa = Val, Tyr, Arg, Gly, or Thr
  VARIANT (2)..(2): Xaa =  Ile, Ser, or Val
  VARIANT (3)..(3): Xaa = Ser, Asn, Asp, Ike, or Tyr
  VARIANT (3)..(3): Xaa = Ser, Asn, Asp, Ile, or Tyr
  VARIANT (4)..(4): Xaa = Pro, Thr, or absent
  VARIANT (5)..(5): Xaa = Tyr, Asn, Thr, Ala, Gly, or Phe
  VARIANT (6)..(6): Xaa =  Ser, Asn, Thr, or Asp
  VARIANT (7)..(7): Xaa =   Gly or Asp
  VARIANT (8)..(8): Xaa =   Gly, Asp, Asn, Arg, or Ser
  VARIANT (9)..(9): Xaa =   Thr or Ala
  VARIANT (10)..(10): Xaa =  Ile, Gly, Ser, Lys, Thr, Asn, or Arg
  VARIANT (12)..(12): Xaa =  Asn, Asp, or Thr
  VARIANT (13)..(13): Xaa =  Gln, Glu, or Pro
  VARIANT (14)..(14): Xaa =  Lys or Ser
  VARIANT (15)..(15): Xaa =  Phe, Tyr or Leu
  VARIANT (16)..(16): Xaa =  Lys, Arg, or Gln
  VARIANT (17)..(17): Xaa =  Gly, Thr, Asp, or Ser
XXXXXXXXXXYXXXXXX

SEQ ID NO: 326 - protein, 17 aa, Artificial Sequence
  Synthetic Construct
  VARIANT (1)..(1): Xaa = Val, Tyr, Arg, Gly, or Thr
  VARIANT (2)..(2): Xaa = Ile, Ser, or Val
  VARIANT (3)..(3): Xaa = Ser, Asn, Asp, Ile, or Tyr
  VARIANT (4)..(4): Xaa = Pro or Thr
  VARIANT (5)..(5): Xaa = Tyr, Asn, Thr, Ala, or Gly
  VARIANT (6)..(6): Xaa = Ser, Asn, Thr, or Asp
  VARIANT (7)..(7): Xaa = Gly or Asp
  VARIANT (8)..(8): Xaa = Gly, Asp, or Asn
  VARIANT (9)..(9): Xaa = Thr or Ala
  VARIANT (10)..(10): Xaa = Gly, Ser, Lys, Thr, Asn, or Arg
  VARIANT (12)..(12): Xaa = Asn, Asp, or Thr
  VARIANT (13)..(13): Xaa = Gln, Glu, or Pro
  VARIANT (15)..(15): Xaa = Phe or Tyr
  VARIANT (16)..(16): Xaa = Lys, Arg, or Gln
  VARIANT (17)..(17): Xaa = Gly, Thr, or Asp
XXXXXXXXXXYXXKXXX

SEQ ID NO: 327 - protein, 15 aa, Artificial Sequence
  Synthetic Construct
  VARIANT (3)..(3): Xaa =  Gly or Asn
  VARIANT (4)..(4): Xaa =  Asp or Gly
  VARIANT (5)..(5): Xaa = Asp or Ile
  VARIANT (6)..(6): Xaa = Ser or Thr
  VARIANT (7)..(7): Xaa = Tyr or Thr
  VARIANT (8)..(8): Xaa = Arg or Ala
  VARIANT (9)..(9): Xaa = Arg or Gly
  VARIANT (10)..(10): Xaa = Gly or Tyr
  VARIANT (13)..(13): Xaa = Leu or Met
ARXXXXXXXXYAXDY

SEQ ID NO: 328 - protein, 17 aa, Artificial Sequence
  Synthetic Construct
  VARIANT (1)..(1): Xaa = Arg or Lys
  VARIANT (4)..(4): Xaa =  Gln or Lys
  VARIANT (7)..(7): Xaa =   Val or Leu
  VARIANT (8)..(8): Xaa =   His, Asp, or Tyr
  VARIANT (9)..(9): Xaa =   Ile, Asn, or Ser
  VARIANT (10)..(10): Xaa =   Ser or absent
  VARIANT (11)..(11): Xaa =  Asp or Asn
  VARIANT (12)..(12): Xaa = Gly or Gln
  VARIANT (13)..(13): Xaa = Asn, Ile, or Lys
  VARIANT (14)..(14): Xaa = Thr or Ser
  VARIANT (15)..(15): Xaa = Tyr or Phe
  VARIANT (17)..(17): Xaa = Gln, His, Tyr, Asn, or Ala
XSSXSLXXXXXXXXXLX

SEQ ID NO: 329 - protein, 11 aa, Artificial Sequence
  Synthetic Construct
  VARIANT (1)..(1): Xaa= Arg, Lys, or Ser
  VARIANT (4)..(4): Xaa= Glu or Gln
  VARIANT (5)..(5): Xaa= Asn, Asp, or Gly
  VARIANT (7)..(7): Xaa= Tyr or Ser
  VARIANT (8)..(8): Xaa= Ser or Asn
  VARIANT (9)..(9): Xaa= Asn, Arg, or Tyr
  VARIANT (11)..(11): Xaa=  Ala or Asn
XASXXIXXXLX

SEQ ID NO: 330 - protein, 7 aa, Artificial Sequence
  Synthetic Construct
  VARIANT (1)..(1): Xaa= Lys, Gln, Tyr, Val, or Leu
  VARIANT (2)..(2): Xaa= Val, Met, or Thr
  VARIANT (4)..(4): Xaa=  Asn, Lys, or Tyr
  VARIANT (5)..(5): Xaa=  Arg or Leu
  VARIANT (6)..(6): Xaa=   Phe, Ala, His, or Asp
XXSXXXS

SEQ ID NO: 331 - protein, 9 aa, Artificial Sequence
  Synthetic Construct
  VARIANT (1)..(1): Xaa= Ser, Trp, or Gln
  VARIANT (2)..(2): Xaa= Gln or His
  VARIANT (3)..(3): Xaa= Ser, Thr, Gly, Tyr, or Phe
  VARIANT (4)..(4): Xaa= Thr, Phe, Trp, Ser
  VARIANT (4)..(4): Xaa= Thr, Phe, Trp, or Ser
  VARIANT (5)..(5): Xaa= His, Ser, Gly, or Asn
  VARIANT (6)..(6): Xaa= Val, Ala, Phe, Tyr, Thr, or Leu
  VARIANT (7)..(7): Xaa= Pro, Thr, or Leu
  VARIANT (8)..(8): Xaa= Tyr, Phe, Pro, or Trp
XXXXXXXXT

SEQ ID NO: 332 - protein, 9 aa, Artificial Sequence
  Synthetic Construct
  VARIANT (2)..(2): Xaa = Gln or His
  VARIANT (3)..(3): Xaa = Tyr or Phe
  VARIANT (4)..(4): Xaa = Phe, Trp, or Ser
  VARIANT (5)..(5): Xaa = Ser, Gly, or Asn
  VARIANT (6)..(6): Xaa = Tyr, Thr, or Leu
  VARIANT (8)..(8): Xaa = Pro, Tyr, or Trp
QXXXXXPXT

SEQ ID NO: 333 - protein, 159 aa, Homo sapiens
SGAHNTTVFQGVAGQSLQVSCPYDSMKHWGRRKAWCRQLGEKGPCQRVVSTHNLWLLSFLRRWNGSTAITDDTLGGTLTITLRNLQPHDAGLYQCQSLHGSEADTLRKVLVEVLADPLDHRDAGDLWFPGESESFEDAHVEHSISRSLLEGEIPFPPTS

SEQ ID NO: 334 - protein, 10 aa, Homo sapiens
DLWFPGESES

SEQ ID NO: 335 - protein, 9 aa, Homo sapiens
DLWFPGESE

SEQ ID NO: 336 - protein, 5 aa, Homo sapiens
DLWFP

SEQ ID NO: 337 - protein, 217 aa, Artificial Sequence
  Synthetic Construct
APELLGGPSVFLFPPKPKDTLMISRTPEVTCVVVDVSHEDPEVKFNWYVDGVEVHNAKTKPREEQYNSTYRVVSVLTVLHQDWLNGKEYKCKVSNKALPAPIEKTISKAKGQPREPQVYTLPPSRDELTKNQVSLTCLVKGFYPSDIAVEWESWGFVWSTYKTTPPVLDSDGSFFLYSKLTVPKSNWQQGFVFSCSVMHEALHNHYTQKSLSLSPGK

SEQ ID NO: 338 - protein, 217 aa, Artificial Sequence
  Synthetic Construct
APELLGGPSVFLFPPKPKDTLMISRTPEVTCVVVDVSHEDPEVKFNWYVDGVEVHNAKTKPREEQYNSTYRVVSVLTVLHQDWLNGKEYKCKVSNKALPAPIEKTISKAKGQPREPQVYTLPPSRDELTKNQVSLTCLVKGFYPSDIAVEWESWGHVWSTYKTTPPVLDSDGSFFLYSKLTVPKSNWQQGYVFSCSVMHEALHNHYTQKSLSLSPGK

SEQ ID NO: 339 - protein, 217 aa, Artificial Sequence
  Synthetic Construct
APELLGGPSVFLFPPKPKDTLMISRTPEVTCVVVDVSHEDPEVKFNWYVDGVEVHNAKTKPREEQYNSTYRVVSVLTVLHQDWLNGKEYKCKVSNKALPAPIEKTISKAKGQPREPQVYTLPPSRDELTKNQVSLTCLVKGFYPSDIAVEWESLGHVWVEQKTTPPVLDSDGSFFLYSKLTVPKSTWQQGWVFSCSVMHEALHNHYTQKSLSLSPGK

SEQ ID NO: 340 - protein, 217 aa, Artificial Sequence
  Synthetic Construct
APELLGGPSVFLFPPKPKDTLMISRTPEVTCVVVDVSHEDPEVKFNWYVDGVEVHNAKTKPREEQYNSTYRVVSVLTVLHQDWLNGKEYKCKVSNKALPAPIEKTISKAKGQPREPQVYTLPPSRDELTKNQVSLTCLVKGFYPSDIAVEWESLGHVWVGVKTTPPVLDSDGSFFLYSKLTVPKSTWQQGWVFSCSVMHEALHNHYTQKSLSLSPGK

SEQ ID NO: 341 - protein, 217 aa, Artificial Sequence
  Synthetic Construct
APELLGGPSVFLFPPKPKDTLMISRTPEVTCVVVDVSHEDPEVKFNWYVDGVEVHNAKTKPREEQYNSTYRVVSVLTVLHQDWLNGKEYKCKVSNKALPAPIEKTISKAKGQPREPQVYTLPPSRDELTKNQVSLTCLVKGFYPSDIAVEWESLGHVWVHTKTTPPVLDSDGSFFLYSKLTVPKSTWQQGWVFSCSVMHEALHNHYTQKSLSLSPGK

SEQ ID NO: 342 - protein, 217 aa, Artificial Sequence
  Synthetic Construct
APELLGGPSVFLFPPKPKDTLMISRTPEVTCVVVDVSHEDPEVKFNWYVDGVEVHNAKTKPREEQYNSTYRVVSVLTVLHQDWLNGKEYKCKVSNKALPAPIEKTISKAKGQPREPQVYTLPPSRDELTKNQVSLTCLVKGFYPSDIAVEWESWGTVWGTYKTTPPVLDSDGSFFLYSKLTVPKSNWQQGYVFSCSVMHEALHNHYTQKSLSLSPGK

SEQ ID NO: 343 - protein, 217 aa, Artificial Sequence
  Synthetic Construct
APELLGGPSVFLFPPKPKDTLMISRTPEVTCVVVDVSHEDPEVKFNWYVDGVEVHNAKTKPREEQYNSTYRVVSVLTVLHQDWLNGKEYKCKVSNKALPAPIEKTISKAKGQPREPQVYTLPPSRDELTKNQVSLTCLVKGFYPSDIAVEWESLGHVWVGTKTTPPVLDSDGSFFLYSKLTVPKSTWQQGWVFSCSVMHEALHNHYTQKSLSLSPGK

SEQ ID NO: 344 - protein, 217 aa, Artificial Sequence
  Synthetic Construct
APELLGGPSVFLFPPKPKDTLMISRTPEVTCVVVDVSHEDPEVKFNWYVDGVEVHNAKTKPREEQYNSTYRVVSVLTVLHQDWLNGKEYKCKVSNKALPAPIEKTISKAKGQPREPQVYTLPPSRDELTKNQVSLTCLVKGFYPSDIAVEWESFGTEWSSYKTTPPVLDSDGSFFLYSKLTVSKEEWQQGFVFSCSVMHEALHNHYTQKSLSLSPGK

SEQ ID NO: 345 - protein, 217 aa, Artificial Sequence
  Synthetic Construct
APELLGGPSVFLFPPKPKDTLMISRTPEVTCVVVDVSHEDPEVKFNWYVDGVEVHNAKTKPREEQYNSTYRVVSVLTVLHQDWLNGKEYKCKVSNKALPAPIEKTISKAKGQPREPQVYTLPPSRDELTKNQVSLTCLVKGFYPSDIAVEWESYGTEWANYKTTPPVLDSDGSFFLYSKLTVSKSEWQQGFVFSCSVMHEALHNHYTQKSLSLSPGK

SEQ ID NO: 346 - protein, 217 aa, Artificial Sequence
  Synthetic Construct
APELLGGPSVFLFPPKPKDTLMISRTPEVTCVVVDVSHEDPEVKFNWYVDGVEVHNAKTKPREEQYNSTYRVVSVLTVLHQDWLNGKEYKCKVSNKALPAPIEKTISKAKGQPREPQVYTLPPSRDELTKNQVSLTCLVKGFYPSDIAVEWESFGTEWSNYKTTPPVLDSDGSFFLYSKLTVSKEEWQQGFVFSCSVMHEALHNHYTQKSLSLSPGK

SEQ ID NO: 347 - protein, 217 aa, Artificial Sequence
  Synthetic Construct
APELLGGPSVFLFPPKPKDTLMISRTPEVTCVVVDVSHEDPEVKFNWYVDGVEVHNAKTKPREEQYNSTYRVVSVLTVLHQDWLNGKEYKCKVSNKALPAPIEKTISKAKGQPREPQVYTLPPSRDELTKNQVSLTCLVKGFYPSDIAVEWESYGTEWSSYKTTPPVLDSDGSFFLYSKLTVSKSEWQQGFVFSCSVMHEALHNHYTQKSLSLSPGK

SEQ ID NO: 348 - protein, 217 aa, Artificial Sequence
  Synthetic Construct
APELLGGPSVFLFPPKPKDTLMISRTPEVTCVVVDVSHEDPEVKFNWYVDGVEVHNAKTKPREEQYNSTYRVVSVLTVLHQDWLNGKEYKCKVSNKALPAPIEKTISKAKGQPREPQVYTLPPSRDELTKNQVSLTCLVKGFYPSDIAVEWESYGTEWVNYKTTPPVLDSDGSFFLYSKLTVSKEEWQQGFVFSCSVMHEALHNHYTQKSLSLSPGK

SEQ ID NO: 349 - protein, 217 aa, Artificial Sequence; identical to SEQ ID NO: 147
  Synthetic Construct

SEQ ID NO: 350 - protein, 217 aa, Artificial Sequence
  Synthetic Construct
APELLGGPSVFLFPPKPKDTLMISRTPEVTCVVVDVSHEDPEVKFNWYVDGVEVHNAKTKPREEQYNSTYRVVSVLTVLHQDWLNGKEYKCKVSNKALPAPIEKTISKAKGQPREPQVYTLPPSRDELTKNQVSLTCLVKGFYPSDIAVEWESFGTEWVNYKTTPPVLDSDGSFFLYSKLTVSKEEWQQGFVFSCSVMHEALHNHYTQKSLSLSPGK

SEQ ID NO: 351 - protein, 217 aa, Artificial Sequence
  Synthetic Construct
APEAAGGPSVFLFPPKPKDTLMISRTPEVTCVVVDVSHEDPEVKFNWYVDGVEVHNAKTKPREEQYNSTYRVVSVLTVLHQDWLNGKEYKCKVSNKALGAPIEKTISKAKGQPREPQVYTLPPSRDELTKNQVSLWCLVKGFYPSDIAVWWESYGTEWSSYKTTPPVLDSDGSFFLYSKLTVTKEEWQQGFVFSCSVMHEALHNHYTQKSLSLSPGK

SEQ ID NO: 352 - protein, 217 aa, Artificial Sequence
  Synthetic Construct
APEAAGGPSVFLFPPKPKDTLYITREPEVTCVVVDVSHEDPEVKFNWYVDGVEVHNAKTKPREEQYNSTYRVVSVLTVLHQDWLNGKEYKCKVSNKALGAPIEKTISKAKGQPREPQVYTLPPSRDELTKNQVSLWCLVKGFYPSDIAVWWESYGTEWSSYKTTPPVLDSDGSFFLYSKLTVTKEEWQQGFVFSCSVMHEALHNHYTQKSLSLSPGK

SEQ ID NO: 353 - protein, 217 aa, Artificial Sequence
  Synthetic Construct
APEAAGGPSVFLFPPKPKDTLMISRTPEVTCVVVDVSHEDPEVKFNWYVDGVEVHNAKTKPREEQYNSTYRVVSVLTVLHQDWLNGKEYKCKVSNKALGAPIEKTISKAKGQPREPQVYTLPPSRDELTKNQVSLSCAVKGFYPSDIAVWWESYGTEWSSYKTTPPVLDSDGSFFLVSKLTVTKEEWQQGFVFSCSVMHEALHNHYTQKSLSLSPGK

SEQ ID NO: 354 - protein, 217 aa, Artificial Sequence
  Synthetic Construct
APEAAGGPSVFLFPPKPKDTLYITREPEVTCVVVDVSHEDPEVKFNWYVDGVEVHNAKTKPREEQYNSTYRVVSVLTVLHQDWLNGKEYKCKVSNKALGAPIEKTISKAKGQPREPQVYTLPPSRDELTKNQVSLSCAVKGFYPSDIAVWWESYGTEWSSYKTTPPVLDSDGSFFLVSKLTVTKEEWQQGFVFSCSVMHEALHNHYTQKSLSLSPGK

SEQ ID NO: 355 - protein, 217 aa, Artificial Sequence
  Synthetic Construct
APELLGGPSVFLFPPKPKDTLMISRTPEVTCVVVDVSHEDPEVKFNWYVDGVEVHNAKTKPREEQYNSTYRVVSVLTVLHQDWLNGKEYKCKVSNKALPAPIEKTISKAKGQPREPQVYTLPPSRDELTKNQVSLWCLVKGFYPSDIAVEWESFGTEWSSYKTTPPVLDSDGSFFLYSKLTVSKEEWQQGFVFSCSVMHEALHNHYTQKSLSLSPGK

SEQ ID NO: 356 - protein, 217 aa, Artificial Sequence
  Synthetic Construct
APEAAGGPSVFLFPPKPKDTLMISRTPEVTCVVVDVSHEDPEVKFNWYVDGVEVHNAKTKPREEQYNSTYRVVSVLTVLHQDWLNGKEYKCKVSNKALPAPIEKTISKAKGQPREPQVYTLPPSRDELTKNQVSLWCLVKGFYPSDIAVEWESFGTEWSSYKTTPPVLDSDGSFFLYSKLTVSKEEWQQGFVFSCSVMHEALHNHYTQKSLSLSPGK

SEQ ID NO: 357 - protein, 217 aa, Artificial Sequence
  Synthetic Construct
APEAAGGPSVFLFPPKPKDTLMISRTPEVTCVVVDVSHEDPEVKFNWYVDGVEVHNAKTKPREEQYNSTYRVVSVLTVLHQDWLNGKEYKCKVSNKALGAPIEKTISKAKGQPREPQVYTLPPSRDELTKNQVSLWCLVKGFYPSDIAVEWESFGTEWSSYKTTPPVLDSDGSFFLYSKLTVSKEEWQQGFVFSCSVMHEALHNHYTQKSLSLSPGK

SEQ ID NO: 358 - protein, 217 aa, Artificial Sequence
  Synthetic Construct
APELLGGPSVFLFPPKPKDTLYITREPEVTCVVVDVSHEDPEVKFNWYVDGVEVHNAKTKPREEQYNSTYRVVSVLTVLHQDWLNGKEYKCKVSNKALPAPIEKTISKAKGQPREPQVYTLPPSRDELTKNQVSLWCLVKGFYPSDIAVEWESFGTEWSSYKTTPPVLDSDGSFFLYSKLTVSKEEWQQGFVFSCSVMHEALHNHYTQKSLSLSPGK

SEQ ID NO: 359 - protein, 217 aa, Artificial Sequence
  Synthetic Construct
APEAAGGPSVFLFPPKPKDTLYITREPEVTCVVVDVSHEDPEVKFNWYVDGVEVHNAKTKPREEQYNSTYRVVSVLTVLHQDWLNGKEYKCKVSNKALPAPIEKTISKAKGQPREPQVYTLPPSRDELTKNQVSLWCLVKGFYPSDIAVEWESFGTEWSSYKTTPPVLDSDGSFFLYSKLTVSKEEWQQGFVFSCSVMHEALHNHYTQKSLSLSPGK

SEQ ID NO: 360 - protein, 217 aa, Artificial Sequence
  Synthetic Construct
APEAAGGPSVFLFPPKPKDTLYITREPEVTCVVVDVSHEDPEVKFNWYVDGVEVHNAKTKPREEQYNSTYRVVSVLTVLHQDWLNGKEYKCKVSNKALGAPIEKTISKAKGQPREPQVYTLPPSRDELTKNQVSLWCLVKGFYPSDIAVEWESFGTEWSSYKTTPPVLDSDGSFFLYSKLTVSKEEWQQGFVFSCSVMHEALHNHYTQKSLSLSPGK

SEQ ID NO: 361 - protein, 217 aa, Artificial Sequence
  Synthetic Construct
APELLGGPSVFLFPPKPKDTLMISRTPEVTCVVVDVSHEDPEVKFNWYVDGVEVHNAKTKPREEQYNSTYRVVSVLTVLHQDWLNGKEYKCKVSNKALPAPIEKTISKAKGQPREPQVYTLPPSRDELTKNQVSLSCAVKGFYPSDIAVEWESFGTEWSSYKTTPPVLDSDGSFFLVSKLTVSKEEWQQGFVFSCSVMHEALHNHYTQKSLSLSPGK

SEQ ID NO: 362 - protein, 217 aa, Artificial Sequence
  Synthetic Construct
APEAAGGPSVFLFPPKPKDTLMISRTPEVTCVVVDVSHEDPEVKFNWYVDGVEVHNAKTKPREEQYNSTYRVVSVLTVLHQDWLNGKEYKCKVSNKALPAPIEKTISKAKGQPREPQVYTLPPSRDELTKNQVSLSCAVKGFYPSDIAVEWESFGTEWSSYKTTPPVLDSDGSFFLVSKLTVSKEEWQQGFVFSCSVMHEALHNHYTQKSLSLSPGK

SEQ ID NO: 363 - protein, 217 aa, Artificial Sequence
  Synthetic Construct
APEAAGGPSVFLFPPKPKDTLMISRTPEVTCVVVDVSHEDPEVKFNWYVDGVEVHNAKTKPREEQYNSTYRVVSVLTVLHQDWLNGKEYKCKVSNKALGAPIEKTISKAKGQPREPQVYTLPPSRDELTKNQVSLSCAVKGFYPSDIAVEWESFGTEWSSYKTTPPVLDSDGSFFLVSKLTVSKEEWQQGFVFSCSVMHEALHNHYTQKSLSLSPGK

SEQ ID NO: 364 - protein, 217 aa, Artificial Sequence
  Synthetic Construct
APELLGGPSVFLFPPKPKDTLYITREPEVTCVVVDVSHEDPEVKFNWYVDGVEVHNAKTKPREEQYNSTYRVVSVLTVLHQDWLNGKEYKCKVSNKALPAPIEKTISKAKGQPREPQVYTLPPSRDELTKNQVSLSCAVKGFYPSDIAVEWESFGTEWSSYKTTPPVLDSDGSFFLVSKLTVSKEEWQQGFVFSCSVMHEALHNHYTQKSLSLSPGK

SEQ ID NO: 365 - protein, 217 aa, Artificial Sequence
  Synthetic Construct
APEAAGGPSVFLFPPKPKDTLYITREPEVTCVVVDVSHEDPEVKFNWYVDGVEVHNAKTKPREEQYNSTYRVVSVLTVLHQDWLNGKEYKCKVSNKALPAPIEKTISKAKGQPREPQVYTLPPSRDELTKNQVSLSCAVKGFYPSDIAVEWESFGTEWSSYKTTPPVLDSDGSFFLVSKLTVSKEEWQQGFVFSCSVMHEALHNHYTQKSLSLSPGK

SEQ ID NO: 366 - protein, 217 aa, Artificial Sequence
  Synthetic Construct
APEAAGGPSVFLFPPKPKDTLYITREPEVTCVVVDVSHEDPEVKFNWYVDGVEVHNAKTKPREEQYNSTYRVVSVLTVLHQDWLNGKEYKCKVSNKALGAPIEKTISKAKGQPREPQVYTLPPSRDELTKNQVSLSCAVKGFYPSDIAVEWESFGTEWSSYKTTPPVLDSDGSFFLVSKLTVSKEEWQQGFVFSCSVMHEALHNHYTQKSLSLSPGK

SEQ ID NO: 367 - protein, 217 aa, Artificial Sequence
  Synthetic Construct
APELLGGPSVFLFPPKPKDTLMISRTPEVTCVVVDVSHEDPEVKFNWYVDGVEVHNAKTKPREEQYNSTYRVVSVLTVLHQDWLNGKEYKCKVSNKALPAPIEKTISKAKGQPREPQVYTLPPSRDELTKNQVSLWCLVKGFYPSDIAVEWESYGTEWANYKTTPPVLDSDGSFFLYSKLTVSKSEWQQGFVFSCSVMHEALHNHYTQKSLSLSPGK

SEQ ID NO: 368 - protein, 217 aa, Artificial Sequence
  Synthetic Construct
APEAAGGPSVFLFPPKPKDTLMISRTPEVTCVVVDVSHEDPEVKFNWYVDGVEVHNAKTKPREEQYNSTYRVVSVLTVLHQDWLNGKEYKCKVSNKALPAPIEKTISKAKGQPREPQVYTLPPSRDELTKNQVSLWCLVKGFYPSDIAVEWESYGTEWANYKTTPPVLDSDGSFFLYSKLTVSKSEWQQGFVFSCSVMHEALHNHYTQKSLSLSPGK

SEQ ID NO: 369 - protein, 217 aa, Artificial Sequence
  Synthetic Construct
APEAAGGPSVFLFPPKPKDTLMISRTPEVTCVVVDVSHEDPEVKFNWYVDGVEVHNAKTKPREEQYNSTYRVVSVLTVLHQDWLNGKEYKCKVSNKALGAPIEKTISKAKGQPREPQVYTLPPSRDELTKNQVSLWCLVKGFYPSDIAVEWESYGTEWANYKTTPPVLDSDGSFFLYSKLTVSKSEWQQGFVFSCSVMHEALHNHYTQKSLSLSPGK

SEQ ID NO: 370 - protein, 217 aa, Artificial Sequence
  Synthetic Construct
APELLGGPSVFLFPPKPKDTLYITREPEVTCVVVDVSHEDPEVKFNWYVDGVEVHNAKTKPREEQYNSTYRVVSVLTVLHQDWLNGKEYKCKVSNKALPAPIEKTISKAKGQPREPQVYTLPPSRDELTKNQVSLWCLVKGFYPSDIAVEWESYGTEWANYKTTPPVLDSDGSFFLYSKLTVSKSEWQQGFVFSCSVMHEALHNHYTQKSLSLSPGK

SEQ ID NO: 371 - protein, 217 aa, Artificial Sequence
  Synthetic Construct
APEAAGGPSVFLFPPKPKDTLYITREPEVTCVVVDVSHEDPEVKFNWYVDGVEVHNAKTKPREEQYNSTYRVVSVLTVLHQDWLNGKEYKCKVSNKALPAPIEKTISKAKGQPREPQVYTLPPSRDELTKNQVSLWCLVKGFYPSDIAVEWESYGTEWANYKTTPPVLDSDGSFFLYSKLTVSKSEWQQGFVFSCSVMHEALHNHYTQKSLSLSPGK

SEQ ID NO: 372 - protein, 217 aa, Artificial Sequence
  Synthetic Construct
APEAAGGPSVFLFPPKPKDTLYITREPEVTCVVVDVSHEDPEVKFNWYVDGVEVHNAKTKPREEQYNSTYRVVSVLTVLHQDWLNGKEYKCKVSNKALGAPIEKTISKAKGQPREPQVYTLPPSRDELTKNQVSLWCLVKGFYPSDIAVEWESYGTEWANYKTTPPVLDSDGSFFLYSKLTVSKSEWQQGFVFSCSVMHEALHNHYTQKSLSLSPGK

SEQ ID NO: 373 - protein, 217 aa, Artificial Sequence
  Synthetic Construct
APELLGGPSVFLFPPKPKDTLMISRTPEVTCVVVDVSHEDPEVKFNWYVDGVEVHNAKTKPREEQYNSTYRVVSVLTVLHQDWLNGKEYKCKVSNKALPAPIEKTISKAKGQPREPQVYTLPPSRDELTKNQVSLSCAVKGFYPSDIAVEWESYGTEWANYKTTPPVLDSDGSFFLVSKLTVSKSEWQQGFVFSCSVMHEALHNHYTQKSLSLSPGK

SEQ ID NO: 374 - protein, 217 aa, Artificial Sequence
  Synthetic Construct
APEAAGGPSVFLFPPKPKDTLMISRTPEVTCVVVDVSHEDPEVKFNWYVDGVEVHNAKTKPREEQYNSTYRVVSVLTVLHQDWLNGKEYKCKVSNKALPAPIEKTISKAKGQPREPQVYTLPPSRDELTKNQVSLSCAVKGFYPSDIAVEWESYGTEWANYKTTPPVLDSDGSFFLVSKLTVSKSEWQQGFVFSCSVMHEALHNHYTQKSLSLSPGK

SEQ ID NO: 375 - protein, 217 aa, Artificial Sequence
  Synthetic Construct
APEAAGGPSVFLFPPKPKDTLMISRTPEVTCVVVDVSHEDPEVKFNWYVDGVEVHNAKTKPREEQYNSTYRVVSVLTVLHQDWLNGKEYKCKVSNKALGAPIEKTISKAKGQPREPQVYTLPPSRDELTKNQVSLSCAVKGFYPSDIAVEWESYGTEWANYKTTPPVLDSDGSFFLVSKLTVSKSEWQQGFVFSCSVMHEALHNHYTQKSLSLSPGK

SEQ ID NO: 376 - protein, 217 aa, Artificial Sequence
  Synthetic Construct
APELLGGPSVFLFPPKPKDTLYITREPEVTCVVVDVSHEDPEVKFNWYVDGVEVHNAKTKPREEQYNSTYRVVSVLTVLHQDWLNGKEYKCKVSNKALPAPIEKTISKAKGQPREPQVYTLPPSRDELTKNQVSLSCAVKGFYPSDIAVEWESYGTEWANYKTTPPVLDSDGSFFLVSKLTVSKSEWQQGFVFSCSVMHEALHNHYTQKSLSLSPGK

SEQ ID NO: 377 - protein, 217 aa, Artificial Sequence
  Synthetic Construct
APEAAGGPSVFLFPPKPKDTLYITREPEVTCVVVDVSHEDPEVKFNWYVDGVEVHNAKTKPREEQYNSTYRVVSVLTVLHQDWLNGKEYKCKVSNKALPAPIEKTISKAKGQPREPQVYTLPPSRDELTKNQVSLSCAVKGFYPSDIAVEWESYGTEWANYKTTPPVLDSDGSFFLVSKLTVSKSEWQQGFVFSCSVMHEALHNHYTQKSLSLSPGK

SEQ ID NO: 378 - protein, 217 aa, Artificial Sequence
  Synthetic Construct
APEAAGGPSVFLFPPKPKDTLYITREPEVTCVVVDVSHEDPEVKFNWYVDGVEVHNAKTKPREEQYNSTYRVVSVLTVLHQDWLNGKEYKCKVSNKALGAPIEKTISKAKGQPREPQVYTLPPSRDELTKNQVSLSCAVKGFYPSDIAVEWESYGTEWANYKTTPPVLDSDGSFFLVSKLTVSKSEWQQGFVFSCSVMHEALHNHYTQKSLSLSPGK

SEQ ID NO: 379 - protein, 217 aa, Artificial Sequence
  Synthetic Construct
APELLGGPSVFLFPPKPKDTLMISRTPEVTCVVVDVSHEDPEVKFNWYVDGVEVHNAKTKPREEQYNSTYRVVSVLTVLHQDWLNGKEYKCKVSNKALPAPIEKTISKAKGQPREPQVYTLPPSRDELTKNQVSLWCLVKGFYPSDIAVEWESFGTEWSNYKTTPPVLDSDGSFFLYSKLTVSKEEWQQGFVFSCSVMHEALHNHYTQKSLSLSPGK

SEQ ID NO: 380 - protein, 217 aa, Artificial Sequence
  Synthetic Construct
APEAAGGPSVFLFPPKPKDTLMISRTPEVTCVVVDVSHEDPEVKFNWYVDGVEVHNAKTKPREEQYNSTYRVVSVLTVLHQDWLNGKEYKCKVSNKALPAPIEKTISKAKGQPREPQVYTLPPSRDELTKNQVSLWCLVKGFYPSDIAVEWESFGTEWSNYKTTPPVLDSDGSFFLYSKLTVSKEEWQQGFVFSCSVMHEALHNHYTQKSLSLSPGK

SEQ ID NO: 381 - protein, 217 aa, Artificial Sequence
  Synthetic Construct
APEAAGGPSVFLFPPKPKDTLMISRTPEVTCVVVDVSHEDPEVKFNWYVDGVEVHNAKTKPREEQYNSTYRVVSVLTVLHQDWLNGKEYKCKVSNKALGAPIEKTISKAKGQPREPQVYTLPPSRDELTKNQVSLWCLVKGFYPSDIAVEWESFGTEWSNYKTTPPVLDSDGSFFLYSKLTVSKEEWQQGFVFSCSVMHEALHNHYTQKSLSLSPGK

SEQ ID NO: 382 - protein, 217 aa, Artificial Sequence
  Synthetic Construct
APELLGGPSVFLFPPKPKDTLYITREPEVTCVVVDVSHEDPEVKFNWYVDGVEVHNAKTKPREEQYNSTYRVVSVLTVLHQDWLNGKEYKCKVSNKALPAPIEKTISKAKGQPREPQVYTLPPSRDELTKNQVSLWCLVKGFYPSDIAVEWESFGTEWSNYKTTPPVLDSDGSFFLYSKLTVSKEEWQQGFVFSCSVMHEALHNHYTQKSLSLSPGK

SEQ ID NO: 383 - protein, 217 aa, Artificial Sequence
  Synthetic Construct
APEAAGGPSVFLFPPKPKDTLYITREPEVTCVVVDVSHEDPEVKFNWYVDGVEVHNAKTKPREEQYNSTYRVVSVLTVLHQDWLNGKEYKCKVSNKALPAPIEKTISKAKGQPREPQVYTLPPSRDELTKNQVSLWCLVKGFYPSDIAVEWESFGTEWSNYKTTPPVLDSDGSFFLYSKLTVSKEEWQQGFVFSCSVMHEALHNHYTQKSLSLSPGK

SEQ ID NO: 384 - protein, 217 aa, Artificial Sequence
  Synthetic Construct
APEAAGGPSVFLFPPKPKDTLYITREPEVTCVVVDVSHEDPEVKFNWYVDGVEVHNAKTKPREEQYNSTYRVVSVLTVLHQDWLNGKEYKCKVSNKALGAPIEKTISKAKGQPREPQVYTLPPSRDELTKNQVSLWCLVKGFYPSDIAVEWESFGTEWSNYKTTPPVLDSDGSFFLYSKLTVSKEEWQQGFVFSCSVMHEALHNHYTQKSLSLSPGK

SEQ ID NO: 385 - protein, 217 aa, Artificial Sequence
  Synthetic Construct
APELLGGPSVFLFPPKPKDTLMISRTPEVTCVVVDVSHEDPEVKFNWYVDGVEVHNAKTKPREEQYNSTYRVVSVLTVLHQDWLNGKEYKCKVSNKALPAPIEKTISKAKGQPREPQVYTLPPSRDELTKNQVSLSCAVKGFYPSDIAVEWESFGTEWSNYKTTPPVLDSDGSFFLVSKLTVSKEEWQQGFVFSCSVMHEALHNHYTQKSLSLSPGK

SEQ ID NO: 386 - protein, 217 aa, Artificial Sequence
  Synthetic Construct
APEAAGGPSVFLFPPKPKDTLMISRTPEVTCVVVDVSHEDPEVKFNWYVDGVEVHNAKTKPREEQYNSTYRVVSVLTVLHQDWLNGKEYKCKVSNKALPAPIEKTISKAKGQPREPQVYTLPPSRDELTKNQVSLSCAVKGFYPSDIAVEWESFGTEWSNYKTTPPVLDSDGSFFLVSKLTVSKEEWQQGFVFSCSVMHEALHNHYTQKSLSLSPGK

SEQ ID NO: 387 - protein, 217 aa, Artificial Sequence
  Synthetic Construct
APEAAGGPSVFLFPPKPKDTLMISRTPEVTCVVVDVSHEDPEVKFNWYVDGVEVHNAKTKPREEQYNSTYRVVSVLTVLHQDWLNGKEYKCKVSNKALGAPIEKTISKAKGQPREPQVYTLPPSRDELTKNQVSLSCAVKGFYPSDIAVEWESFGTEWSNYKTTPPVLDSDGSFFLVSKLTVSKEEWQQGFVFSCSVMHEALHNHYTQKSLSLSPGK

SEQ ID NO: 388 - protein, 217 aa, Artificial Sequence
  Synthetic Construct
APELLGGPSVFLFPPKPKDTLYITREPEVTCVVVDVSHEDPEVKFNWYVDGVEVHNAKTKPREEQYNSTYRVVSVLTVLHQDWLNGKEYKCKVSNKALPAPIEKTISKAKGQPREPQVYTLPPSRDELTKNQVSLSCAVKGFYPSDIAVEWESFGTEWSNYKTTPPVLDSDGSFFLVSKLTVSKEEWQQGFVFSCSVMHEALHNHYTQKSLSLSPGK

SEQ ID NO: 389 - protein, 217 aa, Artificial Sequence
  Synthetic Construct
APEAAGGPSVFLFPPKPKDTLYITREPEVTCVVVDVSHEDPEVKFNWYVDGVEVHNAKTKPREEQYNSTYRVVSVLTVLHQDWLNGKEYKCKVSNKALPAPIEKTISKAKGQPREPQVYTLPPSRDELTKNQVSLSCAVKGFYPSDIAVEWESFGTEWSNYKTTPPVLDSDGSFFLVSKLTVSKEEWQQGFVFSCSVMHEALHNHYTQKSLSLSPGK

SEQ ID NO: 390 - protein, 217 aa, Artificial Sequence
  Synthetic Construct
APEAAGGPSVFLFPPKPKDTLYITREPEVTCVVVDVSHEDPEVKFNWYVDGVEVHNAKTKPREEQYNSTYRVVSVLTVLHQDWLNGKEYKCKVSNKALGAPIEKTISKAKGQPREPQVYTLPPSRDELTKNQVSLSCAVKGFYPSDIAVEWESFGTEWSNYKTTPPVLDSDGSFFLVSKLTVSKEEWQQGFVFSCSVMHEALHNHYTQKSLSLSPGK

SEQ ID NO: 391 - protein, 217 aa, Artificial Sequence
  Synthetic Construct
APELLGGPSVFLFPPKPKDTLMISRTPEVTCVVVDVSHEDPEVKFNWYVDGVEVHNAKTKPREEQYNSTYRVVSVLTVLHQDWLNGKEYKCKVSNKALPAPIEKTISKAKGQPREPQVYTLPPSRDELTKNQVSLTCLVKGFYPSDIAVEWESFGTEWSSYKTTPPVLDSDGSFFLYSKLTVTKEEWQQGFVFSCSVLHEALHSHYTQKSLSLSPGK

SEQ ID NO: 392 - protein, 217 aa, Artificial Sequence
  Synthetic Construct
APELLGGPSVFLFPPKPKDTLMISRTPEVTCVVVDVSHEDPEVKFNWYVDGVEVHNAKTKPREEQYNSTYRVVSVLTVLHQDWLNGKEYKCKVSNKALPAPIEKTISKAKGQPREPQVYTLPPSRDELTKNQVSLWCLVKGFYPSDIAVEWESFGTEWSSYKTTPPVLDSDGSFFLYSKLTVTKEEWQQGFVFSCSVLHEALHSHYTQKSLSLSPGK

SEQ ID NO: 393 - protein, 217 aa, Artificial Sequence
  Synthetic Construct
APEAAGGPSVFLFPPKPKDTLMISRTPEVTCVVVDVSHEDPEVKFNWYVDGVEVHNAKTKPREEQYNSTYRVVSVLTVLHQDWLNGKEYKCKVSNKALPAPIEKTISKAKGQPREPQVYTLPPSRDELTKNQVSLWCLVKGFYPSDIAVEWESFGTEWSSYKTTPPVLDSDGSFFLYSKLTVTKEEWQQGFVFSCSVLHEALHSHYTQKSLSLSPGK

SEQ ID NO: 394 - protein, 217 aa, Artificial Sequence
  Synthetic Construct
APEAAGGPSVFLFPPKPKDTLMISRTPEVTCVVVDVSHEDPEVKFNWYVDGVEVHNAKTKPREEQYNSTYRVVSVLTVLHQDWLNGKEYKCKVSNKALGAPIEKTISKAKGQPREPQVYTLPPSRDELTKNQVSLWCLVKGFYPSDIAVEWESFGTEWSSYKTTPPVLDSDGSFFLYSKLTVTKEEWQQGFVFSCSVLHEALHSHYTQKSLSLSPGK

SEQ ID NO: 395 - protein, 217 aa, Artificial Sequence
  Synthetic Construct
APELLGGPSVFLFPPKPKDTLMISRTPEVTCVVVDVSHEDPEVKFNWYVDGVEVHNAKTKPREEQYNSTYRVVSVLTVLHQDWLNGKEYKCKVSNKALPAPIEKTISKAKGQPREPQVYTLPPSRDELTKNQVSLSCAVKGFYPSDIAVEWESFGTEWSSYKTTPPVLDSDGSFFLVSKLTVTKEEWQQGFVFSCSVLHEALHSHYTQKSLSLSPGK

SEQ ID NO: 396 - protein, 217 aa, Artificial Sequence
  Synthetic Construct
APEAAGGPSVFLFPPKPKDTLMISRTPEVTCVVVDVSHEDPEVKFNWYVDGVEVHNAKTKPREEQYNSTYRVVSVLTVLHQDWLNGKEYKCKVSNKALPAPIEKTISKAKGQPREPQVYTLPPSRDELTKNQVSLSCAVKGFYPSDIAVEWESFGTEWSSYKTTPPVLDSDGSFFLVSKLTVTKEEWQQGFVFSCSVLHEALHSHYTQKSLSLSPGK

SEQ ID NO: 397 - protein, 217 aa, Artificial Sequence
  Synthetic Construct
APEAAGGPSVFLFPPKPKDTLMISRTPEVTCVVVDVSHEDPEVKFNWYVDGVEVHNAKTKPREEQYNSTYRVVSVLTVLHQDWLNGKEYKCKVSNKALGAPIEKTISKAKGQPREPQVYTLPPSRDELTKNQVSLSCAVKGFYPSDIAVEWESFGTEWSSYKTTPPVLDSDGSFFLVSKLTVTKEEWQQGFVFSCSVLHEALHSHYTQKSLSLSPGK

SEQ ID NO: 398 - protein, 217 aa, Artificial Sequence
  Synthetic Construct
APELLGGPSVFLFPPKPKDTLMISRTPEVTCVVVDVSHEDPEVKFNWYVDGVEVHNAKTKPREEQYNSTYRVVSVLTVLHQDWLNGKEYKCKVSNKALPAPIEKTISKAKGQPREPQVYTLPPSRDELTKNQVSLTCLVKGFYPSDIAVEWESFGTEWSSYKTTPPVLDSDGSFFLYSKLTVSKEEWQQGFVFSCSVLHEALHSHYTQKSLSLSPGK

SEQ ID NO: 399 - protein, 217 aa, Artificial Sequence
  Synthetic Construct
APELLGGPSVFLFPPKPKDTLMISRTPEVTCVVVDVSHEDPEVKFNWYVDGVEVHNAKTKPREEQYNSTYRVVSVLTVLHQDWLNGKEYKCKVSNKALPAPIEKTISKAKGQPREPQVYTLPPSRDELTKNQVSLWCLVKGFYPSDIAVEWESFGTEWSSYKTTPPVLDSDGSFFLYSKLTVSKEEWQQGFVFSCSVLHEALHSHYTQKSLSLSPGK

SEQ ID NO: 400 - protein, 217 aa, Artificial Sequence
  Synthetic Construct
APEAAGGPSVFLFPPKPKDTLMISRTPEVTCVVVDVSHEDPEVKFNWYVDGVEVHNAKTKPREEQYNSTYRVVSVLTVLHQDWLNGKEYKCKVSNKALPAPIEKTISKAKGQPREPQVYTLPPSRDELTKNQVSLWCLVKGFYPSDIAVEWESFGTEWSSYKTTPPVLDSDGSFFLYSKLTVSKEEWQQGFVFSCSVLHEALHSHYTQKSLSLSPGK

SEQ ID NO: 401 - protein, 217 aa, Artificial Sequence
  Synthetic Construct
APEAAGGPSVFLFPPKPKDTLMISRTPEVTCVVVDVSHEDPEVKFNWYVDGVEVHNAKTKPREEQYNSTYRVVSVLTVLHQDWLNGKEYKCKVSNKALGAPIEKTISKAKGQPREPQVYTLPPSRDELTKNQVSLWCLVKGFYPSDIAVEWESFGTEWSSYKTTPPVLDSDGSFFLYSKLTVSKEEWQQGFVFSCSVLHEALHSHYTQKSLSLSPGK

SEQ ID NO: 402 - protein, 217 aa, Artificial Sequence
  Synthetic Construct
APELLGGPSVFLFPPKPKDTLMISRTPEVTCVVVDVSHEDPEVKFNWYVDGVEVHNAKTKPREEQYNSTYRVVSVLTVLHQDWLNGKEYKCKVSNKALPAPIEKTISKAKGQPREPQVYTLPPSRDELTKNQVSLSCAVKGFYPSDIAVEWESFGTEWSSYKTTPPVLDSDGSFFLVSKLTVSKEEWQQGFVFSCSVLHEALHSHYTQKSLSLSPGK

SEQ ID NO: 403 - protein, 217 aa, Artificial Sequence
  Synthetic Construct
APEAAGGPSVFLFPPKPKDTLMISRTPEVTCVVVDVSHEDPEVKFNWYVDGVEVHNAKTKPREEQYNSTYRVVSVLTVLHQDWLNGKEYKCKVSNKALPAPIEKTISKAKGQPREPQVYTLPPSRDELTKNQVSLSCAVKGFYPSDIAVEWESFGTEWSSYKTTPPVLDSDGSFFLVSKLTVSKEEWQQGFVFSCSVLHEALHSHYTQKSLSLSPGK

SEQ ID NO: 404 - protein, 217 aa, Artificial Sequence
  Synthetic Construct
APEAAGGPSVFLFPPKPKDTLMISRTPEVTCVVVDVSHEDPEVKFNWYVDGVEVHNAKTKPREEQYNSTYRVVSVLTVLHQDWLNGKEYKCKVSNKALGAPIEKTISKAKGQPREPQVYTLPPSRDELTKNQVSLSCAVKGFYPSDIAVEWESFGTEWSSYKTTPPVLDSDGSFFLVSKLTVSKEEWQQGFVFSCSVLHEALHSHYTQKSLSLSPGK

SEQ ID NO: 405 - protein, 217 aa, Artificial Sequence
  Synthetic Construct
APELLGGPSVFLFPPKPKDTLMISRTPEVTCVVVDVSHEDPEVKFNWYVDGVEVHNAKTKPREEQYNSTYRVVSVLTVLHQDWLNGKEYKCKVSNKALPAPIEKTISKAKGQPREPQVYTLPPSRDELTKNQVSLTCLVKGFYPSDIAVWWESYGTEWSSYKTTPPVLDSDGSFFLYSKLTVTKEEWQQGFVFSCSVLHEALHSHYTQKSLSLSPGK

SEQ ID NO: 406 - protein, 217 aa, Artificial Sequence
  Synthetic Construct
APELLGGPSVFLFPPKPKDTLMISRTPEVTCVVVDVSHEDPEVKFNWYVDGVEVHNAKTKPREEQYNSTYRVVSVLTVLHQDWLNGKEYKCKVSNKALPAPIEKTISKAKGQPREPQVYTLPPSRDELTKNQVSLWCLVKGFYPSDIAVWWESYGTEWSSYKTTPPVLDSDGSFFLYSKLTVTKEEWQQGFVFSCSVLHEALHSHYTQKSLSLSPGK

SEQ ID NO: 407 - protein, 217 aa, Artificial Sequence
  Synthetic Construct
APEAAGGPSVFLFPPKPKDTLMISRTPEVTCVVVDVSHEDPEVKFNWYVDGVEVHNAKTKPREEQYNSTYRVVSVLTVLHQDWLNGKEYKCKVSNKALPAPIEKTISKAKGQPREPQVYTLPPSRDELTKNQVSLWCLVKGFYPSDIAVWWESYGTEWSSYKTTPPVLDSDGSFFLYSKLTVTKEEWQQGFVFSCSVLHEALHSHYTQKSLSLSPGK

SEQ ID NO: 408 - protein, 217 aa, Artificial Sequence
  Synthetic Construct
APEAAGGPSVFLFPPKPKDTLMISRTPEVTCVVVDVSHEDPEVKFNWYVDGVEVHNAKTKPREEQYNSTYRVVSVLTVLHQDWLNGKEYKCKVSNKALGAPIEKTISKAKGQPREPQVYTLPPSRDELTKNQVSLWCLVKGFYPSDIAVWWESYGTEWSSYKTTPPVLDSDGSFFLYSKLTVTKEEWQQGFVFSCSVLHEALHSHYTQKSLSLSPGK

SEQ ID NO: 409 - protein, 217 aa, Artificial Sequence
  Synthetic Construct
APELLGGPSVFLFPPKPKDTLMISRTPEVTCVVVDVSHEDPEVKFNWYVDGVEVHNAKTKPREEQYNSTYRVVSVLTVLHQDWLNGKEYKCKVSNKALPAPIEKTISKAKGQPREPQVYTLPPSRDELTKNQVSLSCAVKGFYPSDIAVWWESYGTEWSSYKTTPPVLDSDGSFFLVSKLTVTKEEWQQGFVFSCSVLHEALHSHYTQKSLSLSPGK

SEQ ID NO: 410 - protein, 217 aa, Artificial Sequence
  Synthetic Construct
APEAAGGPSVFLFPPKPKDTLMISRTPEVTCVVVDVSHEDPEVKFNWYVDGVEVHNAKTKPREEQYNSTYRVVSVLTVLHQDWLNGKEYKCKVSNKALPAPIEKTISKAKGQPREPQVYTLPPSRDELTKNQVSLSCAVKGFYPSDIAVWWESYGTEWSSYKTTPPVLDSDGSFFLVSKLTVTKEEWQQGFVFSCSVLHEALHSHYTQKSLSLSPGK

SEQ ID NO: 411 - protein, 217 aa, Artificial Sequence
  Synthetic Construct
APEAAGGPSVFLFPPKPKDTLMISRTPEVTCVVVDVSHEDPEVKFNWYVDGVEVHNAKTKPREEQYNSTYRVVSVLTVLHQDWLNGKEYKCKVSNKALGAPIEKTISKAKGQPREPQVYTLPPSRDELTKNQVSLSCAVKGFYPSDIAVWWESYGTEWSSYKTTPPVLDSDGSFFLVSKLTVTKEEWQQGFVFSCSVLHEALHSHYTQKSLSLSPGK

SEQ ID NO: 412 - protein, 217 aa, Artificial Sequence
  Synthetic Construct
APELLGGPSVFLFPPKPKDTLMISRTPEVTCVVVDVSHEDPEVKFNWYVDGVEVHNAKTKPREEQYNSTYRVVSVLTVLHQDWLNGKEYKCKVSNKALPAPIEKTISKAKGQPREPQVYTLPPSRDELTKNQVSLTCLVKGFYPSDIAVLWESYGTEWASYKTTPPVLDSDGSFFLYSKLTVTKEEWQQGFVFSCSVLHEALHSHYTQKSLSLSPGK

SEQ ID NO: 413 - protein, 217 aa, Artificial Sequence
  Synthetic Construct
APELLGGPSVFLFPPKPKDTLMISRTPEVTCVVVDVSHEDPEVKFNWYVDGVEVHNAKTKPREEQYNSTYRVVSVLTVLHQDWLNGKEYKCKVSNKALPAPIEKTISKAKGQPREPQVYTLPPSRDELTKNQVSLWCLVKGFYPSDIAVLWESYGTEWASYKTTPPVLDSDGSFFLYSKLTVTKEEWQQGFVFSCSVLHEALHSHYTQKSLSLSPGK

SEQ ID NO: 414 - protein, 217 aa, Artificial Sequence
  Synthetic Construct
APEAAGGPSVFLFPPKPKDTLMISRTPEVTCVVVDVSHEDPEVKFNWYVDGVEVHNAKTKPREEQYNSTYRVVSVLTVLHQDWLNGKEYKCKVSNKALPAPIEKTISKAKGQPREPQVYTLPPSRDELTKNQVSLWCLVKGFYPSDIAVLWESYGTEWASYKTTPPVLDSDGSFFLYSKLTVTKEEWQQGFVFSCSVLHEALHSHYTQKSLSLSPGK

SEQ ID NO: 415 - protein, 217 aa, Artificial Sequence
  Synthetic Construct
APEAAGGPSVFLFPPKPKDTLMISRTPEVTCVVVDVSHEDPEVKFNWYVDGVEVHNAKTKPREEQYNSTYRVVSVLTVLHQDWLNGKEYKCKVSNKALGAPIEKTISKAKGQPREPQVYTLPPSRDELTKNQVSLWCLVKGFYPSDIAVLWESYGTEWASYKTTPPVLDSDGSFFLYSKLTVTKEEWQQGFVFSCSVLHEALHSHYTQKSLSLSPGK

SEQ ID NO: 416 - protein, 217 aa, Artificial Sequence
  Synthetic Construct
APELLGGPSVFLFPPKPKDTLMISRTPEVTCVVVDVSHEDPEVKFNWYVDGVEVHNAKTKPREEQYNSTYRVVSVLTVLHQDWLNGKEYKCKVSNKALPAPIEKTISKAKGQPREPQVYTLPPSRDELTKNQVSLSCAVKGFYPSDIAVLWESYGTEWASYKTTPPVLDSDGSFFLVSKLTVTKEEWQQGFVFSCSVLHEALHSHYTQKSLSLSPGK

SEQ ID NO: 417 - protein, 217 aa, Artificial Sequence
  Synthetic Construct
APEAAGGPSVFLFPPKPKDTLMISRTPEVTCVVVDVSHEDPEVKFNWYVDGVEVHNAKTKPREEQYNSTYRVVSVLTVLHQDWLNGKEYKCKVSNKALPAPIEKTISKAKGQPREPQVYTLPPSRDELTKNQVSLSCAVKGFYPSDIAVLWESYGTEWASYKTTPPVLDSDGSFFLVSKLTVTKEEWQQGFVFSCSVLHEALHSHYTQKSLSLSPGK

SEQ ID NO: 418 - protein, 217 aa, Artificial Sequence
  Synthetic Construct
APEAAGGPSVFLFPPKPKDTLMISRTPEVTCVVVDVSHEDPEVKFNWYVDGVEVHNAKTKPREEQYNSTYRVVSVLTVLHQDWLNGKEYKCKVSNKALGAPIEKTISKAKGQPREPQVYTLPPSRDELTKNQVSLSCAVKGFYPSDIAVLWESYGTEWASYKTTPPVLDSDGSFFLVSKLTVTKEEWQQGFVFSCSVLHEALHSHYTQKSLSLSPGK

SEQ ID NO: 419 - protein, 217 aa, Artificial Sequence
  Synthetic Construct
APELLGGPSVFLFPPKPKDTLMISRTPEVTCVVVDVSHEDPEVKFNWYVDGVEVHNAKTKPREEQYNSTYRVVSVLTVLHQDWLNGKEYKCKVSNKALPAPIEKTISKAKGQPREPQVYTLPPSRDELTKNQVSLTCLVKGFYPSDIAVEWESYGTEWSNYKTTPPVLDSDGSFFLYSKLTVTKEEWQQGFVFSCSVLHEALHSHYTQKSLSLSPGK

SEQ ID NO: 420 - protein, 217 aa, Artificial Sequence
  Synthetic Construct
APELLGGPSVFLFPPKPKDTLMISRTPEVTCVVVDVSHEDPEVKFNWYVDGVEVHNAKTKPREEQYNSTYRVVSVLTVLHQDWLNGKEYKCKVSNKALPAPIEKTISKAKGQPREPQVYTLPPSRDELTKNQVSLWCLVKGFYPSDIAVEWESYGTEWSNYKTTPPVLDSDGSFFLYSKLTVTKEEWQQGFVFSCSVLHEALHSHYTQKSLSLSPGK

SEQ ID NO: 421 - protein, 217 aa, Artificial Sequence
  Synthetic Construct
APEAAGGPSVFLFPPKPKDTLMISRTPEVTCVVVDVSHEDPEVKFNWYVDGVEVHNAKTKPREEQYNSTYRVVSVLTVLHQDWLNGKEYKCKVSNKALPAPIEKTISKAKGQPREPQVYTLPPSRDELTKNQVSLWCLVKGFYPSDIAVEWESYGTEWSNYKTTPPVLDSDGSFFLYSKLTVTKEEWQQGFVFSCSVLHEALHSHYTQKSLSLSPGK

SEQ ID NO: 422 - protein, 217 aa, Artificial Sequence
  Synthetic Construct
APEAAGGPSVFLFPPKPKDTLMISRTPEVTCVVVDVSHEDPEVKFNWYVDGVEVHNAKTKPREEQYNSTYRVVSVLTVLHQDWLNGKEYKCKVSNKALGAPIEKTISKAKGQPREPQVYTLPPSRDELTKNQVSLWCLVKGFYPSDIAVEWESYGTEWSNYKTTPPVLDSDGSFFLYSKLTVTKEEWQQGFVFSCSVLHEALHSHYTQKSLSLSPGK

SEQ ID NO: 423 - protein, 217 aa, Artificial Sequence
  Synthetic Construct
APELLGGPSVFLFPPKPKDTLMISRTPEVTCVVVDVSHEDPEVKFNWYVDGVEVHNAKTKPREEQYNSTYRVVSVLTVLHQDWLNGKEYKCKVSNKALPAPIEKTISKAKGQPREPQVYTLPPSRDELTKNQVSLSCAVKGFYPSDIAVEWESYGTEWSNYKTTPPVLDSDGSFFLVSKLTVTKEEWQQGFVFSCSVLHEALHSHYTQKSLSLSPGK

SEQ ID NO: 424 - protein, 217 aa, Artificial Sequence
  Synthetic Construct
APEAAGGPSVFLFPPKPKDTLMISRTPEVTCVVVDVSHEDPEVKFNWYVDGVEVHNAKTKPREEQYNSTYRVVSVLTVLHQDWLNGKEYKCKVSNKALPAPIEKTISKAKGQPREPQVYTLPPSRDELTKNQVSLSCAVKGFYPSDIAVEWESYGTEWSNYKTTPPVLDSDGSFFLVSKLTVTKEEWQQGFVFSCSVLHEALHSHYTQKSLSLSPGK

SEQ ID NO: 425 - protein, 217 aa, Artificial Sequence
  Synthetic Construct
APEAAGGPSVFLFPPKPKDTLMISRTPEVTCVVVDVSHEDPEVKFNWYVDGVEVHNAKTKPREEQYNSTYRVVSVLTVLHQDWLNGKEYKCKVSNKALGAPIEKTISKAKGQPREPQVYTLPPSRDELTKNQVSLSCAVKGFYPSDIAVEWESYGTEWSNYKTTPPVLDSDGSFFLVSKLTVTKEEWQQGFVFSCSVLHEALHSHYTQKSLSLSPGK

SEQ ID NO: 426 - protein, 217 aa, Artificial Sequence
  Synthetic Construct
APELLGGPSVFLFPPKPKDTLMISRTPEVTCVVVDVSHEDPEVKFNWYVDGVEVHNAKTKPREEQYNSTYRVVSVLTVLHQDWLNGKEYKCKVSNKALPAPIEKTISKAKGQPREPQVYTLPPSRDELTKNQVSLTCLVKGFYPSDIAVEWESFGTEWSNYKTTPPVLDSDGSFFLYSKLTVSKEEWQQGFVFSCSVLHEALHSHYTQKSLSLSPGK

SEQ ID NO: 427 - protein, 217 aa, Artificial Sequence
  Synthetic Construct
APELLGGPSVFLFPPKPKDTLMISRTPEVTCVVVDVSHEDPEVKFNWYVDGVEVHNAKTKPREEQYNSTYRVVSVLTVLHQDWLNGKEYKCKVSNKALPAPIEKTISKAKGQPREPQVYTLPPSRDELTKNQVSLWCLVKGFYPSDIAVEWESFGTEWSNYKTTPPVLDSDGSFFLYSKLTVSKEEWQQGFVFSCSVLHEALHSHYTQKSLSLSPGK

SEQ ID NO: 428 - protein, 217 aa, Artificial Sequence
  Synthetic Construct
APEAAGGPSVFLFPPKPKDTLMISRTPEVTCVVVDVSHEDPEVKFNWYVDGVEVHNAKTKPREEQYNSTYRVVSVLTVLHQDWLNGKEYKCKVSNKALPAPIEKTISKAKGQPREPQVYTLPPSRDELTKNQVSLWCLVKGFYPSDIAVEWESFGTEWSNYKTTPPVLDSDGSFFLYSKLTVSKEEWQQGFVFSCSVLHEALHSHYTQKSLSLSPGK

SEQ ID NO: 429 - protein, 217 aa, Artificial Sequence
  Synthetic Construct
APEAAGGPSVFLFPPKPKDTLMISRTPEVTCVVVDVSHEDPEVKFNWYVDGVEVHNAKTKPREEQYNSTYRVVSVLTVLHQDWLNGKEYKCKVSNKALGAPIEKTISKAKGQPREPQVYTLPPSRDELTKNQVSLWCLVKGFYPSDIAVEWESFGTEWSNYKTTPPVLDSDGSFFLYSKLTVSKEEWQQGFVFSCSVLHEALHSHYTQKSLSLSPGK

SEQ ID NO: 430 - protein, 217 aa, Artificial Sequence
  Synthetic Construct
APELLGGPSVFLFPPKPKDTLMISRTPEVTCVVVDVSHEDPEVKFNWYVDGVEVHNAKTKPREEQYNSTYRVVSVLTVLHQDWLNGKEYKCKVSNKALPAPIEKTISKAKGQPREPQVYTLPPSRDELTKNQVSLSCAVKGFYPSDIAVEWESFGTEWSNYKTTPPVLDSDGSFFLVSKLTVSKEEWQQGFVFSCSVLHEALHSHYTQKSLSLSPGK

SEQ ID NO: 431 - protein, 217 aa, Artificial Sequence
  Synthetic Construct
APEAAGGPSVFLFPPKPKDTLMISRTPEVTCVVVDVSHEDPEVKFNWYVDGVEVHNAKTKPREEQYNSTYRVVSVLTVLHQDWLNGKEYKCKVSNKALPAPIEKTISKAKGQPREPQVYTLPPSRDELTKNQVSLSCAVKGFYPSDIAVEWESFGTEWSNYKTTPPVLDSDGSFFLVSKLTVSKEEWQQGFVFSCSVLHEALHSHYTQKSLSLSPGK

SEQ ID NO: 432 - protein, 217 aa, Artificial Sequence
  Synthetic Construct
APEAAGGPSVFLFPPKPKDTLMISRTPEVTCVVVDVSHEDPEVKFNWYVDGVEVHNAKTKPREEQYNSTYRVVSVLTVLHQDWLNGKEYKCKVSNKALGAPIEKTISKAKGQPREPQVYTLPPSRDELTKNQVSLSCAVKGFYPSDIAVEWESFGTEWSNYKTTPPVLDSDGSFFLVSKLTVSKEEWQQGFVFSCSVLHEALHSHYTQKSLSLSPGK

SEQ ID NO: 433 - protein, 217 aa, Artificial Sequence
  Synthetic Construct
APELLGGPSVFLFPPKPKDTLMISRTPEVTCVVVDVSHEDPEVKFNWYVDGVEVHNAKTKPREEQYNSTYRVVSVLTVLHQDWLNGKEYKCKVSNKALPAPIEKTISKAKGQPREPQVYTLPPSRDELTKNQVSLTCLVKGFYPSDIAVEWESYGTEWANYKTTPPVLDSDGSFFLYSKLTVTKEEWQQGFVFSCSVLHEALHSHYTQKSLSLSPGK

SEQ ID NO: 434 - protein, 217 aa, Artificial Sequence
  Synthetic Construct
APELLGGPSVFLFPPKPKDTLMISRTPEVTCVVVDVSHEDPEVKFNWYVDGVEVHNAKTKPREEQYNSTYRVVSVLTVLHQDWLNGKEYKCKVSNKALPAPIEKTISKAKGQPREPQVYTLPPSRDELTKNQVSLWCLVKGFYPSDIAVEWESYGTEWANYKTTPPVLDSDGSFFLYSKLTVTKEEWQQGFVFSCSVLHEALHSHYTQKSLSLSPGK

SEQ ID NO: 435 - protein, 217 aa, Artificial Sequence
  Synthetic Construct
APEAAGGPSVFLFPPKPKDTLMISRTPEVTCVVVDVSHEDPEVKFNWYVDGVEVHNAKTKPREEQYNSTYRVVSVLTVLHQDWLNGKEYKCKVSNKALPAPIEKTISKAKGQPREPQVYTLPPSRDELTKNQVSLWCLVKGFYPSDIAVEWESYGTEWANYKTTPPVLDSDGSFFLYSKLTVTKEEWQQGFVFSCSVLHEALHSHYTQKSLSLSPGK

SEQ ID NO: 436 - protein, 217 aa, Artificial Sequence
  Synthetic Construct
APEAAGGPSVFLFPPKPKDTLMISRTPEVTCVVVDVSHEDPEVKFNWYVDGVEVHNAKTKPREEQYNSTYRVVSVLTVLHQDWLNGKEYKCKVSNKALGAPIEKTISKAKGQPREPQVYTLPPSRDELTKNQVSLWCLVKGFYPSDIAVEWESYGTEWANYKTTPPVLDSDGSFFLYSKLTVTKEEWQQGFVFSCSVLHEALHSHYTQKSLSLSPGK

SEQ ID NO: 437 - protein, 217 aa, Artificial Sequence
  Synthetic Construct
APELLGGPSVFLFPPKPKDTLMISRTPEVTCVVVDVSHEDPEVKFNWYVDGVEVHNAKTKPREEQYNSTYRVVSVLTVLHQDWLNGKEYKCKVSNKALPAPIEKTISKAKGQPREPQVYTLPPSRDELTKNQVSLSCAVKGFYPSDIAVEWESYGTEWANYKTTPPVLDSDGSFFLVSKLTVTKEEWQQGFVFSCSVLHEALHSHYTQKSLSLSPGK

SEQ ID NO: 438 - protein, 217 aa, Artificial Sequence
  Synthetic Construct
APEAAGGPSVFLFPPKPKDTLMISRTPEVTCVVVDVSHEDPEVKFNWYVDGVEVHNAKTKPREEQYNSTYRVVSVLTVLHQDWLNGKEYKCKVSNKALPAPIEKTISKAKGQPREPQVYTLPPSRDELTKNQVSLSCAVKGFYPSDIAVEWESYGTEWANYKTTPPVLDSDGSFFLVSKLTVTKEEWQQGFVFSCSVLHEALHSHYTQKSLSLSPGK

SEQ ID NO: 439 - protein, 217 aa, Artificial Sequence
  Synthetic Construct
APEAAGGPSVFLFPPKPKDTLMISRTPEVTCVVVDVSHEDPEVKFNWYVDGVEVHNAKTKPREEQYNSTYRVVSVLTVLHQDWLNGKEYKCKVSNKALGAPIEKTISKAKGQPREPQVYTLPPSRDELTKNQVSLSCAVKGFYPSDIAVEWESYGTEWANYKTTPPVLDSDGSFFLVSKLTVTKEEWQQGFVFSCSVLHEALHSHYTQKSLSLSPGK

SEQ ID NO: 440 - protein, 217 aa, Artificial Sequence
  Synthetic Construct
APELLGGPSVFLFPPKPKDTLMISRTPEVTCVVVDVSHEDPEVKFNWYVDGVEVHNAKTKPREEQYNSTYRVVSVLTVLHQDWLNGKEYKCKVSNKALPAPIEKTISKAKGQPREPQVYTLPPSRDELTKNQVSLTCLVKGFYPSDIAVEWESYGTEWANYKTTPPVLDSDGSFFLYSKLTVSKSEWQQGFVFSCSVLHEALHSHYTQKSLSLSPGK

SEQ ID NO: 441 - protein, 217 aa, Artificial Sequence
  Synthetic Construct
APELLGGPSVFLFPPKPKDTLMISRTPEVTCVVVDVSHEDPEVKFNWYVDGVEVHNAKTKPREEQYNSTYRVVSVLTVLHQDWLNGKEYKCKVSNKALPAPIEKTISKAKGQPREPQVYTLPPSRDELTKNQVSLWCLVKGFYPSDIAVEWESYGTEWANYKTTPPVLDSDGSFFLYSKLTVSKSEWQQGFVFSCSVLHEALHSHYTQKSLSLSPGK

SEQ ID NO: 442 - protein, 217 aa, Artificial Sequence
  Synthetic Construct
APEAAGGPSVFLFPPKPKDTLMISRTPEVTCVVVDVSHEDPEVKFNWYVDGVEVHNAKTKPREEQYNSTYRVVSVLTVLHQDWLNGKEYKCKVSNKALPAPIEKTISKAKGQPREPQVYTLPPSRDELTKNQVSLWCLVKGFYPSDIAVEWESYGTEWANYKTTPPVLDSDGSFFLYSKLTVSKSEWQQGFVFSCSVLHEALHSHYTQKSLSLSPGK

SEQ ID NO: 443 - protein, 217 aa, Artificial Sequence
  Synthetic Construct
APEAAGGPSVFLFPPKPKDTLMISRTPEVTCVVVDVSHEDPEVKFNWYVDGVEVHNAKTKPREEQYNSTYRVVSVLTVLHQDWLNGKEYKCKVSNKALGAPIEKTISKAKGQPREPQVYTLPPSRDELTKNQVSLWCLVKGFYPSDIAVEWESYGTEWANYKTTPPVLDSDGSFFLYSKLTVSKSEWQQGFVFSCSVLHEALHSHYTQKSLSLSPGK

SEQ ID NO: 444 - protein, 217 aa, Artificial Sequence
  Synthetic Construct
APELLGGPSVFLFPPKPKDTLMISRTPEVTCVVVDVSHEDPEVKFNWYVDGVEVHNAKTKPREEQYNSTYRVVSVLTVLHQDWLNGKEYKCKVSNKALPAPIEKTISKAKGQPREPQVYTLPPSRDELTKNQVSLSCAVKGFYPSDIAVEWESYGTEWANYKTTPPVLDSDGSFFLVSKLTVSKSEWQQGFVFSCSVLHEALHSHYTQKSLSLSPGK

SEQ ID NO: 445 - protein, 217 aa, Artificial Sequence
  Synthetic Construct
APEAAGGPSVFLFPPKPKDTLMISRTPEVTCVVVDVSHEDPEVKFNWYVDGVEVHNAKTKPREEQYNSTYRVVSVLTVLHQDWLNGKEYKCKVSNKALPAPIEKTISKAKGQPREPQVYTLPPSRDELTKNQVSLSCAVKGFYPSDIAVEWESYGTEWANYKTTPPVLDSDGSFFLVSKLTVSKSEWQQGFVFSCSVLHEALHSHYTQKSLSLSPGK

SEQ ID NO: 446 - protein, 217 aa, Artificial Sequence
  Synthetic Construct
APEAAGGPSVFLFPPKPKDTLMISRTPEVTCVVVDVSHEDPEVKFNWYVDGVEVHNAKTKPREEQYNSTYRVVSVLTVLHQDWLNGKEYKCKVSNKALGAPIEKTISKAKGQPREPQVYTLPPSRDELTKNQVSLSCAVKGFYPSDIAVEWESYGTEWANYKTTPPVLDSDGSFFLVSKLTVSKSEWQQGFVFSCSVLHEALHSHYTQKSLSLSPGK

SEQ ID NO: 447 - protein, 217 aa, Artificial Sequence
  Synthetic Construct
APELLGGPSVFLFPPKPKDTLMISRTPEVTCVVVDVSHEDPEVKFNWYVDGVEVHNAKTKPREEQYNSTYRVVSVLTVLHQDWLNGKEYKCKVSNKALPAPIEKTISKAKGQPREPQVYTLPPSRDELTKNQVSLTCLVKGFYPSDIAVEWESYGTEWVNYKTTPPVLDSDGSFFLYSKLTVTKEEWQQGFVFSCSVLHEALHSHYTQKSLSLSPGK

SEQ ID NO: 448 - protein, 217 aa, Artificial Sequence
  Synthetic Construct
APELLGGPSVFLFPPKPKDTLMISRTPEVTCVVVDVSHEDPEVKFNWYVDGVEVHNAKTKPREEQYNSTYRVVSVLTVLHQDWLNGKEYKCKVSNKALPAPIEKTISKAKGQPREPQVYTLPPSRDELTKNQVSLWCLVKGFYPSDIAVEWESYGTEWVNYKTTPPVLDSDGSFFLYSKLTVTKEEWQQGFVFSCSVLHEALHSHYTQKSLSLSPGK

SEQ ID NO: 449 - protein, 217 aa, Artificial Sequence
  Synthetic Construct
APEAAGGPSVFLFPPKPKDTLMISRTPEVTCVVVDVSHEDPEVKFNWYVDGVEVHNAKTKPREEQYNSTYRVVSVLTVLHQDWLNGKEYKCKVSNKALPAPIEKTISKAKGQPREPQVYTLPPSRDELTKNQVSLWCLVKGFYPSDIAVEWESYGTEWVNYKTTPPVLDSDGSFFLYSKLTVTKEEWQQGFVFSCSVLHEALHSHYTQKSLSLSPGK

SEQ ID NO: 450 - protein, 217 aa, Artificial Sequence
  Synthetic Construct
APEAAGGPSVFLFPPKPKDTLMISRTPEVTCVVVDVSHEDPEVKFNWYVDGVEVHNAKTKPREEQYNSTYRVVSVLTVLHQDWLNGKEYKCKVSNKALGAPIEKTISKAKGQPREPQVYTLPPSRDELTKNQVSLWCLVKGFYPSDIAVEWESYGTEWVNYKTTPPVLDSDGSFFLYSKLTVTKEEWQQGFVFSCSVLHEALHSHYTQKSLSLSPGK

SEQ ID NO: 451 - protein, 217 aa, Artificial Sequence
  Synthetic Construct
APELLGGPSVFLFPPKPKDTLMISRTPEVTCVVVDVSHEDPEVKFNWYVDGVEVHNAKTKPREEQYNSTYRVVSVLTVLHQDWLNGKEYKCKVSNKALPAPIEKTISKAKGQPREPQVYTLPPSRDELTKNQVSLSCAVKGFYPSDIAVEWESYGTEWVNYKTTPPVLDSDGSFFLVSKLTVTKEEWQQGFVFSCSVLHEALHSHYTQKSLSLSPGK

SEQ ID NO: 452 - protein, 217 aa, Artificial Sequence
  Synthetic Construct
APEAAGGPSVFLFPPKPKDTLMISRTPEVTCVVVDVSHEDPEVKFNWYVDGVEVHNAKTKPREEQYNSTYRVVSVLTVLHQDWLNGKEYKCKVSNKALPAPIEKTISKAKGQPREPQVYTLPPSRDELTKNQVSLSCAVKGFYPSDIAVEWESYGTEWVNYKTTPPVLDSDGSFFLVSKLTVTKEEWQQGFVFSCSVLHEALHSHYTQKSLSLSPGK

SEQ ID NO: 453 - protein, 217 aa, Artificial Sequence
  Synthetic Construct
APEAAGGPSVFLFPPKPKDTLMISRTPEVTCVVVDVSHEDPEVKFNWYVDGVEVHNAKTKPREEQYNSTYRVVSVLTVLHQDWLNGKEYKCKVSNKALGAPIEKTISKAKGQPREPQVYTLPPSRDELTKNQVSLSCAVKGFYPSDIAVEWESYGTEWVNYKTTPPVLDSDGSFFLVSKLTVTKEEWQQGFVFSCSVLHEALHSHYTQKSLSLSPGK

SEQ ID NO: 454 - protein, 217 aa, Artificial Sequence
  Synthetic Construct
APELLGGPSVFLFPPKPKDTLMISRTPEVTCVVVDVSHEDPEVKFNWYVDGVEVHNAKTKPREEQYNSTYRVVSVLTVLHQDWLNGKEYKCKVSNKALPAPIEKTISKAKGQPREPQVYTLPPSRDELTKNQVSLTCLVKGFYPSDIAVEWESYGTEWSNYKTTPPVLDSDGSFFLYSKLTVSKEEWQQGFVFSCSVLHEALHSHYTQKSLSLSPGK

SEQ ID NO: 455 - protein, 217 aa, Artificial Sequence
  Synthetic Construct
APELLGGPSVFLFPPKPKDTLMISRTPEVTCVVVDVSHEDPEVKFNWYVDGVEVHNAKTKPREEQYNSTYRVVSVLTVLHQDWLNGKEYKCKVSNKALPAPIEKTISKAKGQPREPQVYTLPPSRDELTKNQVSLWCLVKGFYPSDIAVEWESYGTEWSNYKTTPPVLDSDGSFFLYSKLTVSKEEWQQGFVFSCSVLHEALHSHYTQKSLSLSPGK

SEQ ID NO: 456 - protein, 217 aa, Artificial Sequence
  Synthetic Construct
APEAAGGPSVFLFPPKPKDTLMISRTPEVTCVVVDVSHEDPEVKFNWYVDGVEVHNAKTKPREEQYNSTYRVVSVLTVLHQDWLNGKEYKCKVSNKALPAPIEKTISKAKGQPREPQVYTLPPSRDELTKNQVSLWCLVKGFYPSDIAVEWESYGTEWSNYKTTPPVLDSDGSFFLYSKLTVSKEEWQQGFVFSCSVLHEALHSHYTQKSLSLSPGK

SEQ ID NO: 457 - protein, 217 aa, Artificial Sequence
  Synthetic Construct
APEAAGGPSVFLFPPKPKDTLMISRTPEVTCVVVDVSHEDPEVKFNWYVDGVEVHNAKTKPREEQYNSTYRVVSVLTVLHQDWLNGKEYKCKVSNKALGAPIEKTISKAKGQPREPQVYTLPPSRDELTKNQVSLWCLVKGFYPSDIAVEWESYGTEWSNYKTTPPVLDSDGSFFLYSKLTVSKEEWQQGFVFSCSVLHEALHSHYTQKSLSLSPGK

SEQ ID NO: 458 - protein, 217 aa, Artificial Sequence
  Synthetic Construct
APELLGGPSVFLFPPKPKDTLMISRTPEVTCVVVDVSHEDPEVKFNWYVDGVEVHNAKTKPREEQYNSTYRVVSVLTVLHQDWLNGKEYKCKVSNKALPAPIEKTISKAKGQPREPQVYTLPPSRDELTKNQVSLSCAVKGFYPSDIAVEWESYGTEWSNYKTTPPVLDSDGSFFLVSKLTVSKEEWQQGFVFSCSVLHEALHSHYTQKSLSLSPGK

SEQ ID NO: 459 - protein, 217 aa, Artificial Sequence
  Synthetic Construct
APEAAGGPSVFLFPPKPKDTLMISRTPEVTCVVVDVSHEDPEVKFNWYVDGVEVHNAKTKPREEQYNSTYRVVSVLTVLHQDWLNGKEYKCKVSNKALPAPIEKTISKAKGQPREPQVYTLPPSRDELTKNQVSLSCAVKGFYPSDIAVEWESYGTEWSNYKTTPPVLDSDGSFFLVSKLTVSKEEWQQGFVFSCSVLHEALHSHYTQKSLSLSPGK

SEQ ID NO: 460 - protein, 217 aa, Artificial Sequence
  Synthetic Construct
APEAAGGPSVFLFPPKPKDTLMISRTPEVTCVVVDVSHEDPEVKFNWYVDGVEVHNAKTKPREEQYNSTYRVVSVLTVLHQDWLNGKEYKCKVSNKALGAPIEKTISKAKGQPREPQVYTLPPSRDELTKNQVSLSCAVKGFYPSDIAVEWESYGTEWSNYKTTPPVLDSDGSFFLVSKLTVSKEEWQQGFVFSCSVLHEALHSHYTQKSLSLSPGK

SEQ ID NO: 461 - protein, 217 aa, Artificial Sequence
  Synthetic Construct
APELLGGPSVFLFPPKPKDTLMISRTPEVTCVVVDVSHEDPEVKFNWYVDGVEVHNAKTKPREEQYNSTYRVVSVLTVLHQDWLNGKEYKCKVSNKALPAPIEKTISKAKGQPREPQVYTLPPSRDELTKNQVSLSCAVKGFYPSDIAVEWESNGQPENNYKTTPPVLDSDGSFFLVSKLTVDKSRWQQGNVFSCSVLHEALHSHYTQKSLSLSPGK

SEQ ID NO: 462 - protein, 217 aa, Artificial Sequence
  Synthetic Construct
APEAAGGPSVFLFPPKPKDTLMISRTPEVTCVVVDVSHEDPEVKFNWYVDGVEVHNAKTKPREEQYNSTYRVVSVLTVLHQDWLNGKEYKCKVSNKALPAPIEKTISKAKGQPREPQVYTLPPSRDELTKNQVSLSCAVKGFYPSDIAVEWESNGQPENNYKTTPPVLDSDGSFFLVSKLTVDKSRWQQGNVFSCSVLHEALHSHYTQKSLSLSPGK

SEQ ID NO: 463 - protein, 217 aa, Artificial Sequence
  Synthetic Construct
APELLGGPSVFLFPPKPKDTLMISRTPEVTCVVVDVSHEDPEVKFNWYVDGVEVHNAKTKPREEQYNSTYRVVSVLTVLHQDWLNGKEYKCKVSNKALPAPIEKTISKAKGQPREPQVYTLPPSRDELTKNQVSLWCLVKGFYPSDIAVEWESNGQPENNYKTTPPVLDSDGSFFLYSKLTVDKSRWQQGNVFSCSVLHEALHSHYTQKSLSLSPGK

SEQ ID NO: 464 - protein, 217 aa, Artificial Sequence
  Synthetic Construct
APEAAGGPSVFLFPPKPKDTLMISRTPEVTCVVVDVSHEDPEVKFNWYVDGVEVHNAKTKPREEQYNSTYRVVSVLTVLHQDWLNGKEYKCKVSNKALPAPIEKTISKAKGQPREPQVYTLPPSRDELTKNQVSLWCLVKGFYPSDIAVEWESNGQPENNYKTTPPVLDSDGSFFLYSKLTVDKSRWQQGNVFSCSVLHEALHSHYTQKSLSLSPGK

SEQ ID NO: 465 - protein, 193 aa, Artificial Sequence
  Synthetic Construct
MPALLSLVSLLSVLLMGCVAETGGSGHHHHHHSGTHNTTVFQGVAGQSLQVSCPYDSMKHWGRRKAWCRQLGEKGPCQRVVSTHNLWLLSFLRRWNGSTAITDDTLGGTLTITLRNLQPHDAGLYQCQSLHGSEADTLRKVLVEVLADPLDHRDAGDLWFPGESESFEDAHVEHSISRSLLEGEIPFPPTSAS

What is claimed is:

1. An isolated antibody or antigen-binding portion thereof that specifically binds to a human triggering receptor expressed on myeloid cells 2 (TREM2) protein, wherein the antibody or antigen-binding portion thereof decreases levels of soluble TREM2 protein (sTREM2).

2. The isolated antibody of claim 1, wherein the antibody or antigen-binding portion thereof recognizes an epitope that is the same or substantially the same as the epitope recognized by antibody clone 42E8.H1.

3. The isolated antibody of claim 1, wherein the antibody or antigen-binding portion thereof enhances TREM2 activity.

4. The isolated antibody of claim 3, wherein the antibody or antigen-binding portion thereof induces spleen tyrosine kinase (Syk) phosphorylation.

5. The isolated antibody of claim 3 or 4, wherein the antibody or antigen-binding portion thereof enhances phagocytosis or enhances the migration, differentiation, function, or survival of myeloid cells, microglia, or macrophages.

6. The isolated antibody of claim 5, wherein the antibody or antigen-binding portion thereof enhances microglia function without increasing neuroinflammation.

7. The isolated antibody of any one of claims 3 to 6, wherein the antibody or antigen-binding portion thereof recognizes an epitope that is the same or substantially the same as the epitope recognized by antibody clone 42E8.H1

8. The isolated antibody of claim 3, wherein the antibody increases TREM2 activity in the absence of a TREM2 ligand.

9. The isolated antibody of claim 3, wherein the antibody enhances TREM2 activity without blocking binding of a native TREM2 ligand.

10. The isolated antibody of claim 3, wherein the antibody enhances TREM2 activity that is induced by a TREM2 ligand.

11. The isolated antibody of claim 10, wherein the antibody or antigen-binding portion thereof induces Syk phosphorylation in the presence of a TREM2 ligand.

12. The isolated antibody of claim 3, wherein the antibody selectively enhances activity of a TREM2 ligand.

13. The isolated antibody of claim 3, wherein the antibody prevents activation of TREM2 by a TREM2 ligand.

14. The isolated antibody of claim 3, wherein the antibody blocks binding of a TREM2 ligand to TREM2.

15. The isolated antibody of claim 7, wherein the antibody enhances TREM2 activity that is induced by a TREM2 ligand but does not enhance TREM2 activity in the absence of the TREM2 ligand.

16. The isolated antibody of claim 15, wherein the antibody or antigen-binding portion thereof induces Syk phosphorylation in the presence but not the absence of a TREM2 ligand.

17. The isolated antibody of any one of claims 8 to 16, wherein the TREM2 ligand is selected from the group consisting of 1-palmitoyl-2-(5′-oxo-valeroyl)-sn-glycero-3-phosphocholine (POVPC), 2-Arachidonoylglycerol (2-AG), 7-ketocholesterol (7-KC), 24(S)hydroxycholesterol (240HC), 25(S)hydroxycholesterol (250HC), 27-hydroxycholesterol (270HC), Acyl Carnitine (AC), alkylacylglycerophosphocholine (PAF), α-galactosylceramide (KRN7000), Bis(monoacylglycero)phosphate (BMP), Cardiolipin (CL), Ceramide, Ceramide-1-phosphate (C1P), Cholesteryl ester (CE), Cholesterol phosphate (CP), Diacylglycerol 34:1 (DG 34:1), Diacylglycerol 38:4 (DG 38:4), Diacylglycerol pyrophosphate (DGPP), Dihyrdoceramide (DhCer), Dihydrosphingomyelin (DhSM), Ether phosphatidylcholine (PCe), Free cholesterol (FC), Galactosylceramide (GalCer), Galactosylsphingosine (GalSo), Ganglioside GM1, Ganglioside GM3, Glucosylsphingosine (GlcSo), Hank's Balanced Salt Solution (HBSS), Kdo2-Lipid A (KLA), Lactosylceramide (LacCer), lysoalkylacylglycerophosphocholine (LPAF), Lysophosphatidic acid (LPA), Lysophosphatidylcholine (LPC), Lysophosphatidylethanolamine (LPE), Lysophosphatidylglycerol (LPG), Lysophosphatidylinositol (LPI), Lysosphingomyelin (LSM), Lysophosphatidylserine (LPS), N-Acyl-phosphatidylethanolamine (NAPE), N-Acyl-Serine (NSer), Oxidized phosphatidylcholine (oxPC), Palmitic-acid-9-hydroxy-stearic-acid (PAHSA), Phosphatidylethanolamine (PE), Phosphatidylethanol (PEtOH), Phosphatidic acid (PA), Phosphatidylcholine (PC), Phosphatidylglycerol (PG), Phosphatidylinositol (PI), Phosphatidylserine (PS), Sphinganine, Sphinganine-1-phosphate (Sa1P), Sphingomyelin (SM), Sphingosine, Sphingosine-1-phosphate (So1P), and Sulfatide.

18. The isolated antibody of claim 1, wherein the antibody or antigen-binding portion thereof inhibits TREM2 activity.

19. The isolated antibody of claim 18, wherein the antibody prevents activation of TREM2 by a TREM2 ligand.

20. The isolated antibody of claim 18, wherein the antibody blocks binding of a TREM2 ligand to TREM2.

21. The isolated antibody of claim 19 or 20, wherein the TREM2 ligand is selected from the group consisting of 1-palmitoyl-2-(5′-oxo-valeroyl)-sn-glycero-3-phosphocholine (POVPC), 2-Arachidonoylglycerol (2-AG), 7-ketocholesterol (7-KC), 24(S)hydroxycholesterol (240HC), 25 (S)hydroxycholesterol (25OHC), 27-hydroxycholesterol (270HC), Acyl Carnitine (AC), alkylacylglycerophosphocholine (PAF), α-galactosylceramide (KRN7000), Bis(monoacylglycero)phosphate (BMP), Cardiolipin (CL), Ceramide, Ceramide-1-phosphate (C1P), Cholesteryl ester (CE), Cholesterol phosphate (CP), Diacylglycerol 34:1 (DG 34:1), Diacylglycerol 38:4 (DG 38:4), Diacylglycerol pyrophosphate (DGPP), Dihyrdoceramide (DhCer), Dihydrosphingomyelin (DhSM), Ether phosphatidylcholine (PCe), Free cholesterol (FC), Galactosylceramide (GalCer), Galactosylsphingosine (GalSo), Ganglioside GM1, Ganglioside GM3, Glucosylsphingosine (GlcSo), Hank's Balanced Salt Solution (HBSS), Kdo2-Lipid A (KLA), Lactosylceramide (LacCer), lysoalkylacylglycerophosphocholine (LPAF), Lysophosphatidic acid (LPA), Lysophosphatidylcholine (LPC), Lysophosphatidylethanolamine (LPE), Lysophosphatidylglycerol (LPG), Lysophosphatidylinositol (LPI), Lysosphingomyelin (LSM), Lysophosphatidylserine (LPS), N-Acyl-phosphatidylethanolamine (NAPE), N-Acyl-Serine (NSer), Oxidized phosphatidylcholine (oxPC), Palmitic-acid-9-hydroxy-stearic-acid (PAHSA), Phosphatidylethanolamine (PE), Phosphatidylethanol (PEtOH), Phosphatidic acid (PA), Phosphatidylcholine (PC), Phosphatidylglycerol (PG), Phosphatidylinositol (PI), Phosphatidylserine (PS), Sphinganine, Sphinganine-1-phosphate (Sa1P), Sphingomyelin (SM), Sphingosine, Sphingosine-1-phosphate (So1P), and Sulfatide.

22. The isolated antibody of claim 18, wherein the antibody or antigen-binding portion thereof decreases Syk phosphorylation.

23. An isolated antibody or antigen-binding portion thereof that specifically binds to a human TREM2 protein, wherein the antibody or antigen-binding portion thereof increases levels of sTREM2.

24. The isolated antibody of claim 23, wherein the antibody or antigen-binding portion thereof recognizes an epitope that is the same or substantially the same as the epitope recognized by antibody clone 21D4.D1.

25. The isolated antibody of claim 23, wherein the antibody or antigen-binding portion thereof enhances TREM2 activity.

26. The isolated antibody of claim 25, wherein the antibody or antigen-binding portion thereof induces Syk phosphorylation.

27. The isolated antibody of claim 25 or 26, wherein the antibody or antigen-binding portion thereof enhances phagocytosis or enhances the migration, differentiation, function, or survival of myeloid cells, microglia, or macrophages.

28. The isolated antibody of claim 27, wherein the antibody or antigen-binding portion thereof enhances microglia function without increasing neuroinflammation.

29. The isolated antibody of claim 25, wherein the antibody increases TREM2 activity in the absence of a TREM2 ligand.

30. The isolated antibody of claim 25, wherein the antibody enhances TREM2 activity without blocking binding of a native TREM2 ligand.

31. The isolated antibody of claim 25, wherein the antibody enhances TREM2 activity that is induced by a TREM2 ligand.

32. The isolated antibody of claim 31, wherein the antibody or antigen-binding portion thereof induces Syk phosphorylation in the presence of a TREM2 ligand.

33. The isolated antibody of claim 25, wherein the antibody selectively enhances activity of a TREM2 ligand.

34. The isolated antibody of claim 25, wherein the antibody prevents activation of TREM2 by a TREM2 ligand.

35. The isolated antibody of claim 25, wherein the antibody blocks binding of a TREM2 ligand to TREM2.

36. The isolated antibody of claim 31, wherein the antibody enhances TREM2 activity that is induced by a TREM2 ligand but does not enhance TREM2 activity in the absence of the TREM2 ligand.

37. The isolated antibody of claim 36, wherein the antibody or antigen-binding portion thereof induces Syk phosphorylation in the presence but not the absence of a TREM2 ligand.

38. The isolated antibody of any one of claims 29 to 37, wherein the TREM2 ligand is selected from the group consisting of 1-palmitoyl-2-(5′-oxo-valeroyl)-sn-glycero-3-phosphocholine (POVPC), 2-Arachidonoylglycerol (2-AG), 7-ketocholesterol (7-KC), 24(S)hydroxycholesterol (240HC), 25(S)hydroxycholesterol (250HC), 27-hydroxycholesterol (270HC), Acyl Carnitine (AC), alkylacylglycerophosphocholine (PAF), α-galactosylceramide (KRN7000), Bis(monoacylglycero)phosphate (BMP), Cardiolipin (CL), Ceramide, Ceramide-1-phosphate (C1P), Cholesteryl ester (CE), Cholesterol phosphate (CP), Diacylglycerol 34:1 (DG 34:1), Diacylglycerol 38:4 (DG 38:4), Diacylglycerol pyrophosphate (DGPP), Dihyrdoceramide (DhCer), Dihydrosphingomyelin (DhSM), Ether phosphatidylcholine (PCe), Free cholesterol (FC), Galactosylceramide (GalCer), Galactosylsphingosine (GalSo), Ganglioside GM1, Ganglioside GM3, Glucosylsphingosine (GlcSo), Hank's Balanced Salt Solution (HBSS), Kdo2-Lipid A (KLA), Lactosylceramide (LacCer), lysoalkylacylglycerophosphocholine (LPAF), Lysophosphatidic acid (LPA), Lysophosphatidylcholine (LPC), Lysophosphatidylethanolamine (LPE), Lysophosphatidylglycerol (LPG), Lysophosphatidylinositol (LPI), Lysosphingomyelin (LSM), Lysophosphatidylserine (LPS), N-Acyl-phosphatidylethanolamine (NAPE), N-Acyl-Serine (NSer), Oxidized phosphatidylcholine (oxPC), Palmitic-acid-9-hydroxy-stearic-acid (PAHSA), Phosphatidylethanolamine (PE), Phosphatidylethanol (PEtOH), Phosphatidic acid (PA), Phosphatidylcholine (PC), Phosphatidylglycerol (PG), Phosphatidylinositol (PI), Phosphatidylserine (PS), Sphinganine, Sphinganine-1-phosphate (Sa1P), Sphingomyelin (SM), Sphingosine, Sphingosine-1-phosphate (So1P), and Sulfatide.

39. The isolated antibody of claim 23, wherein the antibody or antigen-binding portion thereof inhibits TREM2 activity.

40. The isolated antibody of claim 39, wherein the antibody prevents activation of TREM2 by a TREM2 ligand.

41. The isolated antibody of claim 39, wherein the antibody blocks binding of a TREM2 ligand to TREM2.

42. The isolated antibody of claim 40 or 41, wherein the TREM2 ligand is selected from the group consisting of 1-palmitoyl-2-(5′-oxo-valeroyl)-sn-glycero-3-phosphocholine (POVPC), 2-Arachidonoylglycerol (2-AG), 7-ketocholesterol (7-KC), 24(S)hydroxycholesterol (240HC), 25 (S)hydroxycholesterol (25OHC), 27-hydroxycholesterol (270HC), Acyl Carnitine (AC), alkylacylglycerophosphocholine (PAF), α-galactosylceramide (KRN7000), Bis(monoacylglycero)phosphate (BMP), Cardiolipin (CL), Ceramide, Ceramide-1-phosphate (C1P), Cholesteryl ester (CE), Cholesterol phosphate (CP), Diacylglycerol 34:1 (DG 34:1), Diacylglycerol 38:4 (DG 38:4), Diacylglycerol pyrophosphate (DGPP), Dihyrdoceramide (DhCer), Dihydrosphingomyelin (DhSM), Ether phosphatidylcholine (PCe), Free cholesterol (FC), Galactosylceramide (GalCer), Galactosylsphingosine (GalSo), Ganglioside GM1, Ganglioside GM3, Glucosylsphingosine (GlcSo), Hank's Balanced Salt Solution (HBSS), Kdo2-Lipid A (KLA), Lactosylceramide (LacCer), lysoalkylacylglycerophosphocholine (LPAF), Lysophosphatidic acid (LPA), Lysophosphatidylcholine (LPC), Lysophosphatidylethanolamine (LPE), Lysophosphatidylglycerol (LPG), Lysophosphatidylinositol (LPI), Lysosphingomyelin (LSM), Lysophosphatidylserine (LPS), N-Acyl-phosphatidylethanolamine (NAPE), N-Acyl-Serine (NSer), Oxidized phosphatidylcholine (oxPC), Palmitic-acid-9-hydroxy-stearic-acid (PAHSA), Phosphatidylethanolamine (PE), Phosphatidylethanol (PEtOH), Phosphatidic acid (PA), Phosphatidylcholine (PC), Phosphatidylglycerol (PG), Phosphatidylinositol (PI), Phosphatidylserine (PS), Sphinganine, Sphinganine-1-phosphate (Sa1P), Sphingomyelin (SM), Sphingosine, Sphingosine-1-phosphate (So1P), and Sulfatide.

43. The isolated antibody of claim 39 or 40, wherein the antibody or antigen-binding portion thereof recognizes an epitope that is the same or substantially the same as the epitope recognized by antibody clone 21D4.D1.

44. The isolated antibody of claim 39, wherein the antibody or antigen-binding portion thereof decreases Syk phosphorylation.

45. An isolated antibody or antigen-binding portion thereof that specifically binds to a human TREM2 protein, wherein the antibody or antigen-binding portion thereof enhances TREM2 activity.

46. The isolated antibody of claim 45, wherein the antibody or antigen-binding portion thereof induces Syk phosphorylation.

47. The isolated antibody of claim 45 or 46, wherein the antibody or antigen-binding portion thereof enhances phagocytosis or enhances the migration, differentiation, function, or survival of myeloid cells, microglia, or macrophages.

48. The isolated antibody of claim 47, wherein the antibody or antigen-binding portion thereof enhances microglia function without increasing neuroinflammation.

49. The isolated antibody of any one of claims 45 to 48, wherein the antibody or antigen-binding portion thereof recognizes an epitope that is the same or substantially the same as the epitope recognized by antibody clone 2G4.B1, 3D3.A1, 7B10.A2, 13B11.A1, 14H11.A1, 21D6.G2, 22G9.D1, 24B4.A1, 26D2.D1, 26E2.A3, 30A8.A1, 38E9.E5, 39H10.A1, 42E8.H1, 43E9.H1, 44E2.H1, 49H11.B1, 52H9.D1, 53H11.D3, 54C2.A1, 55B9.A1, 57D7.A1, 60A4.B1, RS9.E2, RS9.F6, or RS9.F10.

50. The isolated antibody of claim 49, wherein the antibody or antigen-binding portion thereof recognizes an epitope that is the same or substantially the same as the epitope recognized by antibody clone RS9.F6.

51. The isolated antibody of claim 50, wherein the antibody or antigen-binding portion binds a TREM2 fragment that comprises or consists of amino acid residues 140-148.

52. The isolated antibody of claim 50, wherein the antibody or antigen-binding portion thereof binds to an epitope on human TREM2 that comprises amino acid residues 140-144.

53. The isolated antibody of claim 52, wherein the antibody or antigen-binding portion thereof makes direct contact with one or more of residues Asp140, Leu141, Trp142, Phe143, and Pro144.

54. The isolated antibody of claim 53, wherein the antibody or antigen-binding portion thereof makes direct contact with each of residues Asp140, Leu141, Trp142, Phe143, and Pro144.

55. The isolated antibody of claim 45, wherein the antibody increases TREM2 activity in the absence of a TREM2 ligand.

56. The isolated antibody of claim 45, wherein the antibody enhances TREM2 activity without blocking binding of a native TREM2 ligand.

57. The isolated antibody of claim 45, wherein the antibody enhances TREM2 activity that is induced by a TREM2 ligand.

58. The isolated antibody of claim 57, wherein the antibody or antigen-binding portion thereof induces Syk phosphorylation in the presence of a TREM2 ligand.

59. The isolated antibody of claim 45, wherein the antibody selectively enhances activity of a TREM2 ligand.

60. The isolated antibody of claim 45, wherein the antibody blocks binding of a TREM2 ligand to TREM2.

61. The isolated antibody of claim 45, wherein the antibody or antigen-binding portion thereof enhances TREM2 activity that is induced a TREM2 ligand but does not enhance TREM2 activity in the absence of the TREM2 ligand.

62. The isolated antibody of claim 61, wherein the antibody or antigen-binding portion thereof induces Syk phosphorylation in the presence but not the absence of a TREM2 ligand.

63. The isolated antibody of any one of claims 55 to 62, wherein the TREM2 ligand is selected from the group consisting of 1-palmitoyl-2-(5′-oxo-valeroyl)-sn-glycero-3-phosphocholine (POVPC), 2-Arachidonoylglycerol (2-AG), 7-ketocholesterol (7-KC), 24(S)hydroxycholesterol (240HC), 25(S)hydroxycholesterol (250HC), 27-hydroxycholesterol (270HC), Acyl Carnitine (AC), alkylacylglycerophosphocholine (PAF), α-galactosylceramide (KRN7000), Bis(monoacylglycero)phosphate (BMP), Cardiolipin (CL), Ceramide, Ceramide-1-phosphate (C1P), Cholesteryl ester (CE), Cholesterol phosphate (CP), Diacylglycerol 34:1 (DG 34:1), Diacylglycerol 38:4 (DG 38:4), Diacylglycerol pyrophosphate (DGPP), Dihyrdoceramide (DhCer), Dihydrosphingomyelin (DhSM), Ether phosphatidylcholine (PCe), Free cholesterol (FC), Galactosylceramide (GalCer), Galactosylsphingosine (GalSo), Ganglioside GM1, Ganglioside GM3, Glucosylsphingosine (GlcSo), Hank's Balanced Salt Solution (HBSS), Kdo2-Lipid A (KLA), Lactosylceramide (LacCer), lysoalkylacylglycerophosphocholine (LPAF), Lysophosphatidic acid (LPA), Lysophosphatidylcholine (LPC), Lysophosphatidylethanolamine (LPE), Lysophosphatidylglycerol (LPG), Lysophosphatidylinositol (LPI), Lysosphingomyelin (LSM), Lysophosphatidylserine (LPS), N-Acyl-phosphatidylethanolamine (NAPE), N-Acyl-Serine (NSer), Oxidized phosphatidylcholine (oxPC), Palmitic-acid-9-hydroxy-stearic-acid (PAHSA), Phosphatidylethanolamine (PE), Phosphatidylethanol (PEtOH), Phosphatidic acid (PA), Phosphatidylcholine (PC), Phosphatidylglycerol (PG), Phosphatidylinositol (PI), Phosphatidylserine (PS), Sphinganine, Sphinganine-1-phosphate (Sa1P), Sphingomyelin (SM), Sphingosine, Sphingosine-1-phosphate (So1P), and Sulfatide.

64. The isolated antibody of claim 57, wherein the antibody or antigen-binding portion thereof recognizes an epitope that is the same or substantially the same as the epitope recognized by antibody clone 3D3.A1, 8A11.B1, 14D5.F1, 19F10.F3, 21D6.G2, 22B8.B1, 22G9.D1, 26D11.B1, 26E.2.A3, 30A8.A1, 42E8.H1, 43E9.H1, 44E2.H1, 49H11.B1, 52H9.D1, 53H11.D3, 54C2.A1, 59C6.F1, 60 Å4.B1, RS9.F6, or RS9.F10.

65. An isolated antibody or antigen-binding portion thereof that specifically binds to a human TREM2 protein, wherein the antibody or antigen-binding portion thereof inhibits TREM2 activity.

66. The isolated antibody of claim 65, wherein the antibody or antigen-binding portion thereof recognizes an epitope that is the same or substantially the same as the epitope recognized by antibody clone 21D4.D1.

67. The isolated antibody of claim 65, wherein the antibody prevents activation of TREM2 by a TREM2 ligand.

68. The isolated antibody of claim 65, wherein the antibody blocks binding of a TREM2 ligand to TREM2.

69. The isolated antibody of claim 67 or 68, wherein the TREM2 ligand is selected from the group consisting of 1-palmitoyl-2-(5′-oxo-valeroyl)-sn-glycero-3-phosphocholine (POVPC), 2-Arachidonoylglycerol (2-AG), 7-ketocholesterol (7-KC), 24(S)hydroxycholesterol (240HC), 25 (S)hydroxycholesterol (25OHC), 27-hydroxycholesterol (270HC), Acyl Carnitine (AC), alkylacylglycerophosphocholine (PAF), α-galactosylceramide (KRN7000), Bis(monoacylglycero)phosphate (BMP), Cardiolipin (CL), Ceramide, Ceramide-1-phosphate (C1P), Cholesteryl ester (CE), Cholesterol phosphate (CP), Diacylglycerol 34:1 (DG 34:1), Diacylglycerol 38:4 (DG 38:4), Diacylglycerol pyrophosphate (DGPP), Dihyrdoceramide (DhCer), Dihydrosphingomyelin (DhSM), Ether phosphatidylcholine (PCe), Free cholesterol (FC), Galactosylceramide (GalCer), Galactosylsphingosine (GalSo), Ganglioside GM1, Ganglioside GM3, Glucosylsphingosine (GlcSo), Hank's Balanced Salt Solution (HBSS), Kdo2-Lipid A (KLA), Lactosylceramide (LacCer), lysoalkylacylglycerophosphocholine (LPAF), Lysophosphatidic acid (LPA), Lysophosphatidylcholine (LPC), Lysophosphatidylethanolamine (LPE), Lysophosphatidylglycerol (LPG), Lysophosphatidylinositol (LPI), Lysosphingomyelin (LSM), Lysophosphatidylserine (LPS), N-Acyl-phosphatidylethanolamine (NAPE), N-Acyl-Serine (NSer), Oxidized phosphatidylcholine (oxPC), Palmitic-acid-9-hydroxy-stearic-acid (PAHSA), Phosphatidylethanolamine (PE), Phosphatidylethanol (PEtOH), Phosphatidic acid (PA), Phosphatidylcholine (PC), Phosphatidylglycerol (PG), Phosphatidylinositol (PI), Phosphatidylserine (PS), Sphinganine, Sphinganine-1-phosphate (Sa1P), Sphingomyelin (SM), Sphingosine, Sphingosine-1-phosphate (So1P), and Sulfatide.

70. The isolated antibody of claim 67, wherein the antibody or antigen-binding portion thereof recognizes an epitope that is the same or substantially the same as the epitope recognized by antibody clone 2G4.B1, 13B11.A, 14H11.A1, 21D4.D1, 21D11.B1, 24B4.A1, 26D2.D1, 26D5.A1, 30A8.A1, 30F2.A2, 38E9.E5, 39H10.A1, 40H3.A4, 44E3.B1, 51D4.A1, 55B9.A1, 57D7.A1, or RS9.E2.

71. The isolated antibody of claim 65, wherein the antibody or antigen-binding portion thereof decreases Syk phosphorylation.

72. An isolated antibody or antigen-binding portion thereof that specifically binds to a human TREM2 protein, wherein the antibody or antigen-binding portion thereof recognizes an epitope that is the same or substantially the same as the epitope recognized by antibody clone 2G4.B1, 3D3.A1, 7B10.A2, 13B11.A1, 14D5.F1, 14H11.A1, 21D4.D1, 21D6.G2, 21D11, 22B8.B1, 22G9.D1, 24B4.A1, 26D2.D1, 26D5.A1, 26D11.B1, 26E2.A3, 30A8.A1, 30F2.A2, 38E9.E5, 39H10.A1, 40H3.A4, 42E8.H1, 43E9.H1, 44E2.H1, 44E3.B1, 49H11.B1, 51D4, 52H9.D1, 53H11.D3, 54C2.A1, 55B9.A1, 57D7.A1, 59C6.F1, 60A4.B1, RS9.E2, RS9.F6, RS9.F10, RS11.1F5, RS11.1G6, RS11.1A10, RS11.1D11, RS11.4A5, RS11.4H6, RS11.4D7, RS11.4D9, RS11.4F11, RS12.1C6, RS12.1C10, RS12.2D1, RS12.2D4, RS12.2E1, RS12.2F2, RS12.2G1, RS12.2H1, or RS12.3C10.

73. The isolated antibody of claim 72, wherein the antibody or antigen-binding portion thereof has at least 50% overlap with the epitope recognized by an antibody clone selected from the group consisting of 2G4.B1, 3D3.A1, 7B10.A2, 13B11.A1, 14D5.F1, 14H11.A1, 21D4.D1, 21D6.G2, 21D11, 22B8.B1, 22G9.D1, 24B4.A1, 26D2.D1, 26D5.A1, 26D11.B1, 26E2.A3, 30A8.A1, 30F2.A2, 38E9.E5, 39H10.A1, 40H3.A4, 42E8.H1, 43E9.H1, 44E2.H1, 44E3.B1, 49H11.B1, 51D4, 52H9.D1, 53H11.D3, 54C2.A1, 55B9.A1, 57D7.A1, 59C6.F1, 60A4.B1, RS9.E2, RS9.F6, RS9.F10, RS11.1F5, RS11.1G6, RS11.1A10, RS11.1D11, RS11.4A5, RS11.4H6, RS11.4D7, RS11.4D9, RS11.4F11, RS12.1C6, RS12.1C10, RS12.2D1, RS12.2D4, RS12.2E1, RS12.2F2, RS12.2G1, RS12.2H1, and RS12.3C10.

74. The isolated antibody of claim 72, wherein the antibody or antigen-binding portion recognizes an epitope that is the same or substantially the same as the epitope recognized by antibody clone RS9.F6.

75. The isolated antibody of claim 74, wherein the antibody or antigen-binding portion binds to an epitope on human TREM2 that comprises amino acid residues 140-144.

76. The isolated antibody of claim 75, wherein the antibody or antigen-binding portion makes direct contact with one or more of Asp140, Leu141, Trp142, Phe143, and Pro144.

77. The isolated antibody of claim 76, wherein the antibody or antigen-binding portion makes direct contact with each of Asp140, Leu141, Trp142, Phe143, and Pro144.

78. The isolated antibody of claim 74, wherein the antibody or antigen-binding portion binds a TREM2 fragment that comprises or consists of amino acid residues 140-148.

79. The isolated antibody of any one of claims 1 to 78, wherein the antibody or antigen-binding portion thereof comprises:
one or more complementarity determining regions (CDRs) having at least 90% sequence identity to a CDR of antibody clone 2G4.B1, 3D3.A1, 7B10.A2, 13B11.A1, 14D5.F1, 14H11.A1, 21D4.D1, 21D6.G2, 21D11, 22B8.B1, 22G9.D1, 24B4.A1, 26D2.D1, 26D5.A1, 26D11.B1, 26E2.A3, 30A8.A1, 30F2.A2, 38E9.E5, 39H10.A1, 40H3.A4, 42E8.H1, 43E9.H1, 44E2.H1, 44E3.B1, 49H11.B1, 51D4, 52H9.D1, 53H11.D3, 54C2.A1, 55B9.A1, 57D7.A1, 59C6.F1, 60A4.B1, RS9.E2, RS9.F6, RS9.F10, RS11.1F5, RS11.1G6, RS11.1A10, RS11.1D11, RS11.4A5, RS11.4H6, RS11.4D7, RS11.4D9, RS11.4F11, RS12.1C6, RS12.1C10, RS12.2D1, RS12.2D4, RS12.2E1, RS12.2F2, RS12.2G1, RS12.2H1, or RS12.3C10; or
one or more CDRs that has up to two amino acid substitutions relative to a CDR of antibody clone 2G4.B1, 3D3.A1, 7B10.A2, 13B11.A1, 14D5.F1, 14H11.A1, 21D4.D1, 21D6.G2, 21D11, 22B8.B1, 22G9.D1, 24B4.A1, 26D2.D1, 26D5.A1, 26D11.B1, 26E2.A3, 30A8.A1, 30F2.A2, 38E9.E5, 39H10.A1, 40H3.A4, 42E8.H1, 43E9.H1, 44E2.H1, 44E3.B1, 49H11.B1, 51D4, 52H9.D1, 53H11.D3, 54C2.A1, 55B9.A1, 57D7.A1, 59C6.F1, 60A4.B1, RS9.E2, RS9.F6, RS9.F10, RS11.1F5, RS11.1G6, RS11.1A10, RS11.1D11, RS11.4A5, RS11.4H6, RS11.4D7, RS11.4D9, RS11.4F11, RS12.1C6, RS12.1C10, RS12.2D1, RS12.2D4, RS12.2E1, RS12.2F2, RS12.2G1, RS12.2H1, or RS12.3C10.

80. An isolated antibody or antigen-binding portion thereof that specifically binds to a human TREM2 protein, wherein the antibody or antigen-binding portion thereof comprises:
one or more complementarity determining regions (CDRs) having at least 90% sequence identity to a CDR of antibody clone 2G4.B1, 3D3.A1, 7B10.A2, 13B11.A1, 14D5.F1, 14H11.A1, 21D4.D1, 21D6.G2, 21D11, 22B8.B1, 22G9.D1, 24B4.A1, 26D2.D1, 26D5.A1, 26D11.B1, 26E2.A3, 30A8.A1, 30F2.A2, 38E9.E5, 39H10.A1, 40H3.A4, 42E8.H1, 43E9.H1, 44E2.H1, 44E3.B1, 49H11.B1, 51D4, 52H9.D1, 53H11.D3, 54C2.A1, 55B9.A1, 57D7.A1, 59C6.F1, 60A4.B1, RS9.E2, RS9.F6, RS9.F10, RS11.1F5, RS11.1G6, RS11.1A10, RS11.1D11, RS11.4A5, RS11.4H6, RS11.4D7, RS11.4D9, RS11.4F11, RS12.1C6, RS12.1C10, RS12.2D1, RS12.2D4, RS12.2E1, RS12.2F2, RS12.2G1, RS12.2H1, or RS12.3C10; or
one or more CDRs that has up to two amino acid substitutions relative to a CDR of antibody clone 2G4.B1, 3D3.A1, 7B10.A2, 13B11.A1, 14D5.F1, 14H11.A1, 21D4.D1, 21D6.G2, 21D11, 22B8.B1, 22G9.D1, 24B4.A1, 26D2.D1, 26D5.A1, 26D11.B1, 26E2.A3, 30A8.A1, 30F2.A2, 38E9.E5, 39H10.A1, 40H3.A4, 42E8.H1, 43E9.H1, 44E2.H1, 44E3.B1, 49H11.B1, 51D4, 52H9.D1, 53H11.D3, 54C2.A1, 55B9.A1, 57D7.A1, 59C6.F1, 60A4.B1, RS9.E2, RS9.F6, RS9.F10, RS11.1F5, RS11.1G6, RS11.1A10, RS11.1D11, RS11.4A5, RS11.4H6, RS11.4D7, RS11.4D9, RS11.4F11, RS12.1C6, RS12.1C10, RS12.2D1, RS12.2D4, RS12.2E1, RS12.2F2, RS12.2G1, RS12.2H1, or RS12.3C10.

81. The isolated antibody of claim 79 or 80, wherein the antibody or antigen-binding portion thereof comprises each of a heavy chain CDR1 (CDR-H1), a heavy chain CDR2 (CDR-H2), a heavy chain CDR3 (CDR-H3), a light chain CDR1 (CDR-L1), a light chain CDR2 (CDR-L2), and a light chain CDR3 (CDR-L3) that is identical to a CDR-H1, CDR-H2, CDR-H3, CDR-L1, CDR-L2, and CDR-L3 of antibody clone 2G4.B1, 3D3.A1, 7B10.A2, 13B11.A1, 14D5.F1, 14H11.A1, 21D4.D1, 21D6.G2, 21D11, 22B8.B1, 22G9.D1, 24B4.A1, 26D2.D1, 26D5.A1, 26D11.B1, 26E2.A3, 30A8.A1, 30F2.A2, 38E9.E5, 39H10.A1, 40H3.A4, 42E8.H1, 43E9.H1, 44E2.H1, 44E3.B1, 49H11.B1, 51D4, 52H9.D1, 53H11.D3, 54C2.A1, 55B9.A1, 57D7.A1, 59C6.F1, 60A4.B1, RS9.E2, RS9.F6, RS9.F10, RS11.1F5, RS11.1G6, RS11.1A10, RS11.1D11, RS11.4A5, RS11.4H6, RS11.4D7, RS11.4D9, RS11.4F11, RS12.1C6, RS12.1C10, RS12.2D1, RS12.2D4, RS12.2E1, RS12.2F2, RS12.2G1, RS12.2H1, or RS12.3C10.

82. The isolated antibody of any one of claims 1 to 81, wherein the antibody or antigen-binding portion thereof comprises:
a heavy chain variable region comprising an amino acid sequence that has at least 90% sequence identity to the heavy chain variable region of antibody clone 2G4.B1, 3D3.A1, 7B10.A2, 13B11.A1, 14D5.F1, 14H11.A1, 21D4.D1, 21D6.G2, 21D11, 22B8.B1, 22G9.D1, 24B4.A1, 26D2.D1, 26D5.A1, 26D11.B1, 26E2.A3, 30A8.A1, 30F2.A2, 38E9.E5, 39H10.A1, 40H3.A4, 42E8.H1, 43E9.H1, 44E2.H1, 44E3.B1, 49H11.B1, 51D4, 52H9.D1, 53H11.D3, 54C2.A1, 55B9.A1, 57D7.A1, 59C6.F1, 60A4.B1, RS9.E2, RS9.F6, RS9.F10, RS11.1F5, RS11.1G6, RS11.1A10, RS11.1D11, RS11.4A5, RS11.4H6, RS11.4D7, RS11.4D9, RS11.4F11, RS12.1C6, RS12.1C10, RS12.2D1, RS12.2D4, RS12.2E1, RS12.2F2, RS12.2G1, RS12.2H1, or RS12.3C10; and/or
a light chain variable region comprising an amino acid sequence that has at least 90% sequence identity to the light chain variable region of 2G4.B1, 3D3.A1, 7B10.A2, 13B11.A1, 14D5.F1, 14H11.A1, 21D4.D1, 21D6.G2, 21D11, 22B8.B1, 22G9.D1, 24B4.A1, 26D2.D1, 26D5.A1, 26D11.B1, 26E2.A3, 30A8.A1, 30F2.A2, 38E9.E5, 39H10.A1, 40H3.A4, 42E8.H1, 43E9.H1, 44E2.H1, 44E3.B1, 49H11.B1, 51D4, 52H9.D1, 53H11.D3, 54C2.A1, 55B9.A1, 57D7.A1, 59C6.F1, 60A4.B1, RS9.E2, RS9.F6, RS9.F10, RS11.1F5, RS11.1G6, RS11.1A10, RS11.1D11, RS11.4A5, RS11.4H6, RS11.4D7, RS11.4D9, RS11.4F11, RS12.1C6, RS12.1C10, RS12.2D1, RS12.2D4, RS12.2E1, RS12.2F2, RS12.2G1, RS12.2H1, or RS12.3C10.

83. The isolated antibody of claim 82, wherein the antibody or antigen-binding portion thereof comprises:
a heavy chain variable region comprising (i) an amino acid sequence that has at least 75% sequence identity to the heavy chain variable region of antibody clone 2G4.B1, 3D3.A1, 7B10.A2, 13B11.A1, 14D5.F1, 14H11.A1, 21D4.D1, 21D6.G2, 21D11, 22B8.B1, 22G9.D1, 24B4.A1, 26D2.D1, 26D5.A1, 26D11.B1, 26E2.A3, 30A8.A1, 30F2.A2, 38E9.E5, 39H10.A1, 40H3.A4, 42E8.H1, 43E9.H1, 44E2.H1, 44E3.B1, 49H11.B1, 51D4, 52H9.D1, 53H11.D3, 54C2.A1, 55B9.A1, 57D7.A1, 59C6.F1, 60A4.B1, RS9.E2, RS9.F6, RS9.F10, RS11.1F5, RS11.1G6, RS11.1A10, RS11.1D11, RS11.4A5, RS11.4H6, RS11.4D7, RS11.4D9, RS11.4F11, RS12.1C6, RS12.1C10, RS12.2D1, RS12.2D4, RS12.2E1, RS12.2F2, RS12.2G1, RS12.2H1, or RS12.3C10 and (ii) a CDR-H1, CDR-H2, and CDR-H3 that is identical to the CDR-H1, CDR-H2, and CDR-H3 of the antibody clone; and/or
a light chain variable region comprising (i) an amino acid sequence that has at least 75% sequence identity to the light chain variable region of antibody clone 2G4.B1, 3D3.A1, 7B10.A2, 13B11.A1, 14D5.F1, 14H11.A1, 21D4.D1, 21D6.G2, 21D11, 22B8.B1, 22G9.D1, 24B4.A1, 26D2.D1, 26D5.A1, 26D11.B1, 26E2.A3, 30A8.A1, 30F2.A2, 38E9.E5, 39H10.A1, 40H3.A4, 42E8.H1, 43E9.H1, 44E2.H1, 44E3.B1, 49H11.B1, 51D4, 52H9.D1, 53H11.D3, 54C2.A1, 55B9.A1, 57D7.A1, 59C6.F1, 60A4.B1, RS9.E2, RS9.F6, RS9.F10, RS11.1F5, RS11.1G6, RS11.1A10, RS11.1D11, RS11.4A5, RS11.4H6, RS11.4D7, RS11.4D9, RS11.4F11, RS12.1C6, RS12.1C10, RS12.2D1, RS12.2D4, RS12.2E1, RS12.2F2, RS12.2G1, RS12.2H1, or RS12.3C10 and (ii) a CDR-L1, CDR-L2, and CDR-L3 that is identical to the CDR-L1, CDR-L2, and CDR-L3 of the antibody clone.

84. The isolated antibody of any one of claims 1 to 83, wherein the antibody or antigen-binding portion thereof comprises one or more CDRs selected from the group consisting of:
(a) a heavy chain CDR1 sequence having at least 90% sequence identity to the amino acid sequence of any one of SEQ ID NOs:8, 36, 39, 45, 51, 57, 62, 68, 74, 81, 85, 307, and 315 or having up to two amino acid substitutions relative to the amino acid sequence of any one of SEQ ID NOs:8, 36, 39, 45, 51, 57, 62, 68, 74, 81, 85, 307, and 315;
(b) a heavy chain CDR2 sequence having at least 90% sequence identity to the amino acid sequence of any one of SEQ ID NOs:9, 37, 40, 46, 52, 58, 63, 69, 75, 79, 82, 86, 308, and 316 or having up to two amino acid substitutions relative to the amino acid sequence of any one of SEQ ID NOs:9, 37, 40, 46, 52, 58, 63, 69, 75, 79, 82, 86, 308, and 316;
(c) a heavy chain CDR3 sequence having at least 90% sequence identity to the amino acid sequence of any one of SEQ ID NOs:10, 41, 47, 53, 59, 64, 70, 76, 83, 87, 309, and 317 or having up to two amino acid substitutions relative to the amino acid sequence of any one of SEQ ID NOs:10, 41, 47, 53, 59, 64, 70, 76, 83, 87, 309, and 317;
(d) a light chain CDR1 sequence having at least 90% sequence identity to the amino acid sequence of any one of SEQ ID NOs: 11, 42, 48, 54, 60, 65, 71, 77, 88, and 311 or having up to two amino acid substitutions relative to the amino acid sequence of any one of SEQ ID NOs:11, 42, 48, 54, 60, 65, 71, 77, 88, and 311;
(e) a light chain CDR2 sequence having at least 90% sequence identity to the amino acid sequence of any one of SEQ ID NOs:12, 38, 43, 49, 55, 66, 72, 312, and 319 or having up to two amino acid substitutions relative to the amino acid sequence of any one of SEQ ID NOs: 12, 38, 43, 49, 55, 66, 72, 312, and 319; and
(f) a light chain CDR3 sequence having at least 90% sequence identity to the amino acid sequence of any one of SEQ ID NOs: 13, 44, 50, 56, 61, 67, 73, 78, 80, 84, 89, and 313 or having up to two amino acid substitutions relative to the amino acid sequence of any one of SEQ ID NOs: 13, 44, 50, 56, 61, 67, 73, 78, 80, 84, 89, and 313.

85. The isolated antibody of claim 84, wherein the antibody or antigen-binding portion thereof comprises one or more CDRs selected from the group consisting of:
(a) a heavy chain CDR1 sequence comprising the amino acid sequence of any one of SEQ ID NOs:8, 36, 39, 45, 51, 57, 62, 68, 74, 81, 85, 307, and 315;
(b) a heavy chain CDR2 sequence comprising the amino acid sequence of any one of SEQ ID NOs:9, 37, 40, 46, 52, 58, 63, 69, 75, 79, 82, 86, 308, and 316;
(c) a heavy chain CDR3 sequence comprising the amino acid sequence of any one of SEQ ID NOs: 10, 41, 47, 53, 59, 64, 70, 76, 83, 87, 309, and 317;
(d) a light chain CDR1 sequence comprising the amino acid sequence of any one of SEQ ID NOs:11, 42, 48, 54, 60, 65, 71, 77, 88, and 311;
(e) a light chain CDR2 sequence comprising the amino acid sequence of any one of SEQ ID NOs: 12, 38, 43, 49, 55, 66, 72, 312, and 319; and
(f) a light chain CDR3 sequence comprising the amino acid sequence of any one of SEQ ID NOs: 13, 44, 50, 56, 61, 67, 73, 78, 80, 84, 89, and 313.

86. The isolated antibody of claim 85, comprising:
(a) a heavy chain CDR1 sequence comprising the amino acid sequence of SEQ ID NO:8, a heavy chain CDR2 sequence comprising the amino acid sequence of SEQ ID NO:9, a heavy chain CDR3 sequence comprising the amino acid sequence of SEQ ID NO: 10, a light chain CDR1 sequence comprising the amino acid sequence of SEQ ID NO: 11, a light chain CDR2 sequence comprising the amino acid sequence of SEQ ID NO: 12, and a light chain CDR3 sequence comprising the amino acid sequence of SEQ ID NO: 13; or
(b) a heavy chain CDR1 sequence comprising the amino acid sequence of SEQ ID NO:36, a heavy chain CDR2 sequence comprising the amino acid sequence of SEQ ID NO:37, a heavy chain CDR3 sequence comprising the amino acid sequence of SEQ ID NO: 10, a light chain CDR1 sequence comprising the amino acid sequence of SEQ ID NO: 11, a light chain CDR2 sequence comprising the amino acid sequence of SEQ ID NO:38, and a light chain CDR3 sequence comprising the amino acid sequence of SEQ ID NO: 13; or
(c) a heavy chain CDR1 sequence comprising the amino acid sequence of SEQ ID NO:39, a heavy chain CDR2 sequence comprising the amino acid sequence of SEQ ID NO:40, a heavy chain CDR3 sequence comprising the amino acid sequence of SEQ ID NO:41, a light chain CDR1 sequence comprising the amino acid sequence of SEQ ID NO:42, a light chain CDR2 sequence comprising the amino acid sequence of SEQ ID NO:43, and a light chain CDR3 sequence comprising the amino acid sequence of SEQ ID NO:44; or
(d) a heavy chain CDR1 sequence comprising the amino acid sequence of SEQ ID NO:45, a heavy chain CDR2 sequence comprising the amino acid sequence of SEQ ID NO:46, a heavy chain CDR3 sequence comprising the amino acid sequence of SEQ ID NO:47, a light chain CDR1 sequence comprising the amino acid sequence of SEQ ID NO:48, a light chain CDR2 sequence comprising the amino acid sequence of SEQ ID NO:49, and a light chain CDR3 sequence comprising the amino acid sequence of SEQ ID NO:50; or
(e) a heavy chain CDR1 sequence comprising the amino acid sequence of SEQ ID NO:51, a heavy chain CDR2 sequence comprising the amino acid sequence of SEQ ID NO:52, a heavy chain CDR3 sequence comprising the amino acid sequence of SEQ ID NO:53, a light chain CDR1 sequence comprising the amino acid sequence of SEQ ID NO:54, a light chain CDR2 sequence comprising the amino acid sequence of SEQ ID NO:55, and a light chain CDR3 sequence comprising the amino acid sequence of SEQ ID NO:56; or
(f) a heavy chain CDR1 sequence comprising the amino acid sequence of SEQ ID NO:57, a heavy chain CDR2 sequence comprising the amino acid sequence of SEQ ID NO:58, a heavy chain CDR3 sequence comprising the amino acid sequence of SEQ ID NO:59, a light chain CDR1 sequence comprising the amino acid sequence of SEQ ID NO:60, a light chain CDR2 sequence comprising the amino acid sequence of SEQ ID NO:38, and a light chain CDR3 sequence comprising the amino acid sequence of SEQ ID NO:61; or
(g) a heavy chain CDR1 sequence comprising the amino acid sequence of SEQ ID NO:62, a heavy chain CDR2 sequence comprising the amino acid sequence of SEQ ID NO:63, a heavy chain CDR3 sequence comprising the amino acid sequence of SEQ ID NO:64, a light chain CDR1 sequence comprising the amino acid sequence of SEQ ID NO:65, a light chain CDR2 sequence comprising the amino acid sequence of SEQ ID NO:66, and a light chain CDR3 sequence comprising the amino acid sequence of SEQ ID NO:67; or
(h) a heavy chain CDR1 sequence comprising the amino acid sequence of SEQ ID NO:68, a heavy chain CDR2 sequence comprising the amino acid sequence of SEQ ID NO:69, a heavy chain CDR3 sequence comprising the amino acid sequence of SEQ ID NO:70, a light chain CDR1 sequence comprising the amino acid sequence of SEQ ID NO:71, a light chain CDR2 sequence comprising the amino acid sequence of SEQ ID NO:72, and a light chain CDR3 sequence comprising the amino acid sequence of SEQ ID NO:73; or
(i) a heavy chain CDR1 sequence comprising the amino acid sequence of SEQ ID NO:74, a heavy chain CDR2 sequence comprising the amino acid sequence of SEQ ID NO:75, a heavy chain CDR3 sequence comprising the amino acid sequence of SEQ ID NO:76, a light chain CDR1 sequence comprising the amino acid sequence of SEQ ID NO:77, a light chain CDR2 sequence comprising the amino acid sequence of SEQ ID NO:38, and a light chain CDR3 sequence comprising the amino acid sequence of SEQ ID NO:78; or
(j) a heavy chain CDR1 sequence comprising the amino acid sequence of SEQ ID NO:74, a heavy chain CDR2 sequence comprising the amino acid sequence of SEQ ID NO:79, a heavy chain CDR3 sequence comprising the amino acid sequence of SEQ ID NO:76, a light chain CDR1 sequence comprising the amino acid sequence of SEQ ID NO:77, a light chain CDR2 sequence comprising the amino acid sequence of SEQ ID NO:38, and a light chain CDR3 sequence comprising the amino acid sequence of SEQ ID NO:80; or
(k) a heavy chain CDR1 sequence comprising the amino acid sequence of SEQ ID NO:81, a heavy chain CDR2 sequence comprising the amino acid sequence of SEQ ID NO:82, a heavy chain CDR3 sequence comprising the amino acid sequence of SEQ ID NO:83, a light chain CDR1 sequence comprising the amino acid sequence of SEQ ID NO:60, a light chain CDR2 sequence comprising the amino acid sequence of SEQ ID NO:38, and a light chain CDR3 sequence comprising the amino acid sequence of SEQ ID NO:84; or
(l) a heavy chain CDR1 sequence comprising the amino acid sequence of SEQ ID NO:85, a heavy chain CDR2 sequence comprising the amino acid sequence of SEQ ID NO:86, a heavy chain CDR3 sequence comprising the amino acid sequence of SEQ ID NO:87, a light chain CDR1 sequence comprising the amino acid sequence of SEQ ID NO:88, a light chain CDR2 sequence comprising the amino acid sequence of SEQ ID NO:38, and a light chain CDR3 sequence comprising the amino acid sequence of SEQ ID NO:89; or
(m) a heavy chain CDR1 sequence comprising the amino acid sequence of SEQ ID NO:307, a heavy chain CDR2 sequence comprising the amino acid sequence of SEQ ID NO:308, a heavy chain CDR3 sequence comprising the amino acid sequence of SEQ ID NO:309, a light chain CDR1 sequence comprising the amino acid sequence of SEQ ID NO:311, a light chain CDR2 sequence comprising the amino acid sequence of SEQ ID NO:312, and a light chain CDR3 sequence comprising the amino acid sequence of SEQ ID NO:313; or
(n) a heavy chain CDR1 sequence comprising the amino acid sequence of SEQ ID NO:315, a heavy chain CDR2 sequence comprising the amino acid sequence of SEQ ID NO:316, a heavy chain CDR3 sequence comprising the amino acid sequence of SEQ ID NO:317, a light chain CDR1 sequence comprising the amino acid sequence of SEQ ID NO:48, a light chain CDR2 sequence comprising the amino acid sequence of SEQ ID NO:319, and a light chain CDR3 sequence comprising the amino acid sequence of SEQ ID NO:50.

87. The isolated antibody of claim 85, comprising a heavy chain variable region comprising an amino acid sequence that has at least 90% sequence identity to any one of SEQ ID NOs:6, 14, 15, 16, 17, 18, 19, 20, 21, 22, 23, 24, 306, and 314.

88. The isolated antibody of claim 85, comprising a light chain variable region comprising an amino acid sequence that has at least 90% sequence identity to any one of SEQ ID NOs:7, 25, 26, 27, 28, 29, 30, 31, 32, 33, 34, 35, 310, and 318.

89. The isolated antibody of claim 85, comprising:
(a) a heavy chain variable region comprising an amino acid sequence that has at least 90% sequence identity to SEQ ID NO:6; and a light chain variable region comprising an amino acid sequence that has at least 90% sequence identity to SEQ ID NO:7; or
(b) a heavy chain variable region comprising an amino acid sequence that has at least 90% sequence identity to SEQ ID NO:14; and a light chain variable region comprising an amino acid sequence that has at least 90% sequence identity to SEQ ID NO:25; or
(c) a heavy chain variable region comprising an amino acid sequence that has at least 90% sequence identity to SEQ ID NO:15; and a light chain variable region comprising an amino acid sequence that has at least 90% sequence identity to SEQ ID NO:26; or
(d) a heavy chain variable region comprising an amino acid sequence that has at least 90% sequence identity to SEQ ID NO:16; and a light chain variable region comprising an amino acid sequence that has at least 90% sequence identity to SEQ ID NO:27; or
(e) a heavy chain variable region comprising an amino acid sequence that has at least 90% sequence identity to SEQ ID NO:17; and a light chain variable region comprising an amino acid sequence that has at least 90% sequence identity to SEQ ID NO:28; or
(f) a heavy chain variable region comprising an amino acid sequence that has at least 90% sequence identity to SEQ ID NO:18; and a light chain variable region comprising an amino acid sequence that has at least 90% sequence identity to SEQ ID NO:29; or
(g) a heavy chain variable region comprising an amino acid sequence that has at least 90% sequence identity to SEQ ID NO:19; and a light chain variable region comprising an amino acid sequence that has at least 90% sequence identity to SEQ ID NO:30; or
(h) a heavy chain variable region comprising an amino acid sequence that has at least 90% sequence identity to SEQ ID N020; and a light chain variable region comprising an amino acid sequence that has at least 90% sequence identity to SEQ ID NO:31; or
(i) a heavy chain variable region comprising an amino acid sequence that has at least 90% sequence identity to SEQ ID NO:21; and a light chain variable region comprising an amino acid sequence that has at least 90% sequence identity to SEQ ID NO:32; or
(j) a heavy chain variable region comprising an amino acid sequence that has at least 90% sequence identity to SEQ ID NO:22; and a light chain variable region comprising an amino acid sequence that has at least 90% sequence identity to SEQ ID NO:33; or
(k) a heavy chain variable region comprising an amino acid sequence that has at least 90% sequence identity to SEQ ID NO:23; and a light chain variable region comprising an amino acid sequence that has at least 90% sequence identity to SEQ ID NO:34; or
(l) a heavy chain variable region comprising an amino acid sequence that has at least 90% sequence identity to SEQ ID NO:24; and a light chain variable region comprising an amino acid sequence that has at least 90% sequence identity to SEQ ID NO:35; or
(m) a heavy chain variable region comprising an amino acid sequence that has at least 90% sequence identity to SEQ ID NO:306, and a light chain variable region comprising an amino acid sequence that has at least 90% sequence identity to SEQ ID NO:310; or
(n) a heavy chain variable region comprising an amino acid sequence that has at least 90% sequence identity to SEQ ID NO:314, and a light chain variable region comprising an amino acid sequence that has at least 90% sequence identity to SEQ ID NO:318.

90. An isolated antibody or antigen-binding portion thereof that specifically binds to a human TREM2 protein, wherein the antibody or antigen-binding portion thereof comprises:
(a) a light chain variable region; and
(b) a heavy chain variable region comprising a heavy chain CDR1 (CDR-H1), a heavy chain CDR2 (CDR-H2), and a heavy chain CDR3 (CDR-H3), wherein:
(i) CDR-H1 comprises the formula GX₂X₃X₄X₅X₆X₇XX₉X₁₀X₁₁ (I), wherein: X₂ is Y or F; X₃ is T, N, or S; X₄ is F, L, or I; X₅ is T, S, or K; X₆ is D, S, or E; X₇ is D or absent; X₈ is H, Y, or T; X₉ is A, N, G, V, W, T, or Y; X₁₀ is M, I, or W; and X₁₁ is H, Q, or N;
(ii) CDR-H2 comprises the formula X₁X₂X₃X₄X₅X₆X₇X₈X₉X₁₀YX₁₂X₁₃X₁₄X₁₅X₁₆X₁₇ (V), wherein: X₁ is D, V, Y, R, G, or T; X₂ is I, S, or V; X₃ is L, S, N, D, I, or Y; X₄ is P, T, or absent; X₅ is S, Y, N, T, A, G, or F; X₆ is I, S, N, T, or D; X₇ is G or D; X₈ is G, D, N, R, or S; X₉ is R, T, or A; X₁₀ is I, G, S, K, T, N, or R; X₁₂ is G, N, D, or T; X₁₃ is V, Q, E, or P; X₁₄ is K or S; X₁₅ is F, Y or L; X₁₆ is K, R, Q, or is absent; and X₁₇ is G, T, D, S, or is absent; and
(iii) CDR-H3 comprises an amino acid sequence selected from the group consisting of SEQ ID NO:10, SEQ ID NO:47, SEQ ID NO:53, SEQ ID NO:59, SEQ ID NO:70, SEQ ID NO:76, SEQ ID NO:83, SEQ ID NO:87, SEQ ID NO:319, and SEQ ID NO:317 or comprises the formula ARX₃X₄X₅X₆X₇XX₉X₁₀YAX₁₃DY (VIII), wherein: X₃ is G or N; X₄ is D or G; X₅ is D or I; X₆ is S or T; X₇ is Y or T; X₈ is R or A; X₉ is R or G; X₁₀ is G or Y; and X₁₃ is L or M.

91. The isolated antibody of claim 90, wherein the amino acids of formula I are further defined as follows: X₂ is Y; X₃ is T or S; X₅ is T or S; X₈ is H or Y; and X₉ is A, N, G, V, W, or T.

92. The isolated antibody of claim 90 or 91, wherein in CDR-H1 X₇ is absent.

93. The isolated antibody of any one of claims 90 to 92, wherein in CDR-H1 X₁₀ is W and X11 is N.

94. The isolated antibody of claim 90, wherein the amino acids of formula I are further defined as follows: X₃ is T or N; X₇ is absent; X₁₀ is M or I, and X₁₁ is H or Q.

95. The isolated antibody of claim 91 or 92, wherein CDR-H2 has the formula GYTX₄X₅X₆X₈X₉X₁₀X₁₁ (IV), wherein: X₄ is F or L; X₅ is T or S; X₆ is D, S, or E; X₈ is H or Y; X₉ is A, N, G, V, W, or T; X₁₀ is M or I, and X₁₁ is H or Q.

96. The isolated antibody of any one of claims 90 to 95, wherein X₄ of CDR-H1 is F.

97. The isolated antibody of any one of claims 90 to 96, wherein X₅ of CDR-H1 is T.

98. The isolated antibody of claim 96 or 97, wherein X₄ and X₅ of CDR-H1 are F and T, respectively.

99. The isolated antibody of any one of claims 90 to 98, wherein X₆ of CDR-H1 is D or S.

100. The isolated antibody of claim 99, wherein X₆ of CDR-H1 is D.

101. The isolated antibody of claim 99, wherein X₆ of CDR-H1 is S.

102. The isolated antibody of any one of claims 90 to 101, wherein X₈ of CDR-H1 is Y.

103. The isolated antibody of any one of claims 90 to 102, wherein X₁₀ of CDR-H1 is M.

104. The isolated antibody of any one of claims 90 to 103, wherein X₁₁ of CDR-H1 is H.

105. The isolated antibody of claim 103 or 104, wherein X₁₀ and X₁₁ of CDR-H1 are M and H, respectively.

106. The isolated antibody of any one of claims 90 to 102, wherein X₁₀ and X₁₁ of CDR-H1 are I and Q, respectively.

107. The isolated antibody of any one of claims 90 to 106, wherein the amino acids of formula V are further defined as follows: X₁ is V, Y, R, G, or T; X₃ is S, N, D, I, or Y; X₅ is Y, N, T, A, G, or F; X₆ is S, N, T, or D; X₉ is T or A; X₁₂ is N, D, or T; X₁₃ is Q, E, or P; X₁₆ is K, R, or Q; X₁₇ is G, T, D, or S.

108. The isolated antibody of claim 107, wherein the amino acids of formula V are further defined as follows: X₄ is P or T; X₅ is Y, N, T, A, or G; X₈ is G, D, or N; X₁₀ is G, S, K, T, N, or R; X₁₄ is K; X₁₅ is F or Y; and X₁₇ is G, T, or D.

109. The isolated antibody of any one of claims 90 to 108, wherein the antibody comprises a light chain variable region comprising a light chain CDR1 (CDR-L1), a light chain CDR-2 (CDR-L2), and a light chain CDR3 (CDR-L3), wherein:
(i) CDR-L1 comprises the formula X₁SSX₄SLX₇X₈X₉X₁₀X₁₁X₁₂X₁₃X₁₄X₁₅LX₁₇ (IX), wherein: X₁ is R or K; X₄ is Q or K; X₇ is V or L; X₈ is H, D, or Y; X₉ is I, N, or S; X₁₀ is S or absent; X₁₁ is D or N; X₁₂ is G or Q; X₁₃ is N, I, or K; X₁₄ is T or S; X₁₅ is Y or F; and X₁₇ is Q, H, Y, N, or A; or CDR-L1 comprises the formula X₁ASX₄X₅IX₇X₈X₉LX₁₁ (X), wherein: X₁ is R, K, or S; X₄ is E or Q; X₅ is N, D, or G; X₇ is Y or S; X₈ is S or N; X₉ is N, R, or Y; and X₁₁ is A or N;
(ii) CDR-L2 comprises the formula X₁X₂SX₄X₅X₆S (XI), wherein: X₁ is K, Q, Y, V, or L; X₂ is V, M, or T; X₄ is N, K, or Y; X₅ is R or L; and X₆ is F, A, H, or D; or CDR-L2 comprises the amino acid sequence of SEQ ID NO:43, SEQ ID NO:55, or SEQ ID NO:66; and
(iii) CDR-L3 comprises the formula X₁X₂X₃X₄X₅X₆X₇X₈T (XII), wherein: X₁ is S, W, or Q; X₂ is Q or H; X₃ is S, T, G, Y, or F; X₄ is T, F, W, or S; X₅ is H, S, G, or N; X₆ is V, A, F, Y, T, or L; X₇ is P, T, or L; and X₈ is Y, F, P, or W; or CDR-L3 comprises the amino acid sequence of SEQ ID NO:73.

110. The isolated antibody of claim 109, wherein X₄ of formula IX is Q.

111. The isolated antibody of claim 109 or 110, wherein X₈ of formula IX is H.

112. The isolated antibody of any one of claims 109 to 111, wherein X₉ of formula IX is I or S.

113. The isolated antibody of any one of claims 109 to 112, wherein X₁₀ of formula IX is absent.

114. The isolated antibody of any one of claims 109 to 113, wherein X₁₁ of formula IX is N.

115. The isolated antibody of any one of claims 109 to 114, wherein X₁₂ of formula IX is G.

116. The isolated antibody of any one of claims 109 to 115, wherein X₁₃ of formula IX is N or K.

117. The isolated antibody of any one of claims 109 to 116, wherein X₁₄ of formula IX is T.

118. The isolated antibody of any one of claims 109 to 111, wherein X₁₅ of formula IX is Y.

119. The isolated antibody of any one of claims 109 to 118, wherein X₂ of formula XI is V.

120. The isolated antibody of any one of claims 109 to 119, wherein X₄ of formula XI is N.

121. The isolated antibody of any one of claims 109 to 120, wherein X₅ of formula XI is R.

122. The isolated antibody of any one of claims 109 to 121, wherein X₅ of formula XI is L.

123. The isolated antibody of any one of claims 109 to 122, wherein the amino acids of formula XII are further defined as follows: X₁ is Q; X₃ is Y or F; X₄ is F, W, or S; X₅ is S, G, or N; X₆ is Y, T, or L; X₇ is P; X₈ is P, Y, or W.

124. The isolated antibody of any one of claims 109 to 123, wherein X₂ of formula XII is Q.

125. The isolated antibody of any one of claims 109 to 124, wherein X₄ of formula XII is T.

126. The isolated antibody of any one of claims 109 to 125, wherein X₅ of formula XII is H.

127. The isolated antibody of any one of claims 109 to 122, wherein the amino acids of formula XII are further defined as follows: X₁ is S or W; X₂ is Q; X₃ is S, T, or G; X₄ is T; X₅ is H; X₆ is V, A, or F; X₇ is P, T, or L; and X₈ is Y, F, or P.

128. The isolated antibody of claim 127, wherein X₆ of formula XII is V or F.

129. An isolated antibody or antigen-binding portion thereof that specifically binds to a human TREM2 protein, wherein the antibody or antigen-binding portion thereof comprises one or more CDRs selected from the group consisting of:
(a) a heavy chain CDR1 sequence having at least 90% sequence identity to the amino acid sequence of any one of SEQ ID NOs:8, 36, 39, 45, 51, 57, 62, 68, 74, 81, 85, 307, and 315 or having up to two amino acid substitutions relative to the amino acid sequence of any one of SEQ ID NOs:8, 36, 39, 45, 51, 57, 62, 68, 74, 81, 85, 307, and 315;
(b) a heavy chain CDR2 sequence having at least 90% sequence identity to the amino acid sequence of any one of SEQ ID NOs:9, 37, 40, 46, 52, 58, 63, 69, 75, 79, 82, 86, 308, and 316 or having up to two amino acid substitutions relative to the amino acid sequence of any one of SEQ ID NOs:9, 37, 40, 46, 52, 58, 63, 69, 75, 79, 82, 86, 308, and 316;
(c) a heavy chain CDR3 sequence having at least 90% sequence identity to the amino acid sequence of any one of SEQ ID NOs:10, 41, 47, 53, 59, 64, 70, 76, 83, 87, 319, and 317 or having up to two amino acid substitutions relative to the amino acid sequence of any one of SEQ ID NOs:10, 41, 47, 53, 59, 64, 70, 76, 83, 87, 319, and 317;
(d) a light chain CDR1 sequence having at least 90% sequence identity to the amino acid sequence of any one of SEQ ID NOs: 11, 42, 48, 54, 60, 65, 71, 77, 88, and 311 or having up to two amino acid substitutions relative to the amino acid sequence of any one of SEQ ID NOs:11, 42, 48, 54, 60, 65, 71, 77, 88, and 311;
(e) a light chain CDR2 sequence having at least 90% sequence identity to the amino acid sequence of any one of SEQ ID NOs:12, 38, 43, 49, 55, 66, 72, 312, and 319 or having up to two amino acid substitutions relative to the amino acid sequence of any one of SEQ ID NOs: 12, 38, 43, 49, 55, 66, 72, 312, and 319; and
(f) a light chain CDR3 sequence having at least 90% sequence identity to the amino acid sequence of any one of SEQ ID NOs: 13, 44, 50, 56, 61, 67, 73, 78, 80, 84, 89, and 313 or having up to two amino acid substitutions relative to the amino acid sequence of any one of SEQ ID NOs: 13, 44, 50, 56, 61, 67, 73, 78, 80, 84, 89, and 313.

130. The isolated antibody of claim 129, comprising one or more CDRs selected from the group consisting of:
(a) a heavy chain CDR1 comprising the amino acid sequence of any one of SEQ ID NOs:8, 36, 39, 45, 51, 57, 62, 68, 74, 81, 85, 307, and 315;
(b) a heavy chain CDR2 sequence comprising the amino acid sequence of any one of SEQ ID NOs:9, 37, 40, 46, 52, 58, 63, 69, 75, 79, 82, 86, 308, and 316;
(c) a heavy chain CDR3 sequence comprising the amino acid sequence of any one of SEQ ID NOs:10, 41, 47, 53, 59, 64, 70, 76, 83, 87, 319, and 317;
(d) a light chain CDR1 sequence comprising the amino acid sequence of S any one of SEQ ID NOs:11, 42, 48, 54, 60, 65, 71, 77, 88, and 311;
(e) a light chain CDR2 sequence comprising the amino acid sequence of any one of SEQ ID NOs: 12, 38, 43, 49, 55, 66, 72, 312, and 319; and
(f) a light chain CDR3 sequence comprising the amino acid sequence of any one of SEQ ID NOs: 13, 44, 50, 56, 61, 67, 73, 78, 80, 84, 89, and 313.

131. The isolated antibody of claim 130, comprising:
(a) a heavy chain CDR1 sequence comprising the amino acid sequence of SEQ ID NO:8, a heavy chain CDR2 sequence comprising the amino acid sequence of SEQ ID NO:9, a heavy chain CDR3 sequence comprising the amino acid sequence of SEQ ID NO: 10, a light chain CDR1 sequence comprising the amino acid sequence of SEQ ID NO: 11, a light chain CDR2 sequence comprising the amino acid sequence of SEQ ID NO: 12, and a light chain CDR3 sequence comprising the amino acid sequence of SEQ ID NO: 13; or
(b) a heavy chain CDR1 sequence comprising the amino acid sequence of SEQ ID NO:36, a heavy chain CDR2 sequence comprising the amino acid sequence of SEQ ID NO:37, a heavy chain CDR3 sequence comprising the amino acid sequence of SEQ ID NO: 10, a light chain CDR1 sequence comprising the amino acid sequence of SEQ ID NO: 11, a light chain CDR2 sequence comprising the amino acid sequence of SEQ ID NO:38, and a light chain CDR3 sequence comprising the amino acid sequence of SEQ ID NO: 13; or
(c) a heavy chain CDR1 sequence comprising the amino acid sequence of SEQ ID NO:39, a heavy chain CDR2 sequence comprising the amino acid sequence of SEQ ID NO:40, a heavy chain CDR3 sequence comprising the amino acid sequence of SEQ ID NO:41, a light chain CDR1 sequence comprising the amino acid sequence of SEQ ID NO:42, a light chain CDR2 sequence comprising the amino acid sequence of SEQ ID NO:43, and a light chain CDR3 sequence comprising the amino acid sequence of SEQ ID NO:44; or
(d) a heavy chain CDR1 sequence comprising the amino acid sequence of SEQ ID NO:45, a heavy chain CDR2 sequence comprising the amino acid sequence of SEQ ID NO:46, a heavy chain CDR3 sequence comprising the amino acid sequence of SEQ ID NO:47, a light chain CDR1 sequence comprising the amino acid sequence of SEQ ID NO:48, a light chain CDR2 sequence comprising the amino acid sequence of SEQ ID NO:49, and a light chain CDR3 sequence comprising the amino acid sequence of SEQ ID NO:50; or
(e) a heavy chain CDR1 sequence comprising the amino acid sequence of SEQ ID NO:51, a heavy chain CDR2 sequence comprising the amino acid sequence of SEQ ID NO:52, a heavy chain CDR3 sequence comprising the amino acid sequence of SEQ ID NO:53, a light chain CDR1 sequence comprising the amino acid sequence of SEQ ID NO:54, a light chain CDR2 sequence comprising the amino acid sequence of SEQ ID NO:55, and a light chain CDR3 sequence comprising the amino acid sequence of SEQ ID NO:56; or
(f) a heavy chain CDR1 sequence comprising the amino acid sequence of SEQ ID NO:57, a heavy chain CDR2 sequence comprising the amino acid sequence of SEQ ID NO:58, a heavy chain CDR3 sequence comprising the amino acid sequence of SEQ ID NO:59, a light chain CDR1 sequence comprising the amino acid sequence of SEQ ID NO:60, a light chain CDR2 sequence comprising the amino acid sequence of SEQ ID NO:38, and a light chain CDR3 sequence comprising the amino acid sequence of SEQ ID NO:61; or
(g) a heavy chain CDR1 sequence comprising the amino acid sequence of SEQ ID NO:62, a heavy chain CDR2 sequence comprising the amino acid sequence of SEQ ID NO:63, a heavy chain CDR3 sequence comprising the amino acid sequence of SEQ ID NO:64, a light chain CDR1 sequence comprising the amino acid sequence of SEQ ID NO:65, a light chain CDR2 sequence comprising the amino acid sequence of SEQ ID NO:66, and a light chain CDR3 sequence comprising the amino acid sequence of SEQ ID NO:67; or
(h) a heavy chain CDR1 sequence comprising the amino acid sequence of SEQ ID NO:68, a heavy chain CDR2 sequence comprising the amino acid sequence of SEQ ID NO:69, a heavy chain CDR3 sequence comprising the amino acid sequence of SEQ ID NO:70, a light chain CDR1 sequence comprising the amino acid sequence of SEQ ID NO:71, a light chain CDR2 sequence comprising the amino acid sequence of SEQ ID NO:72, and a light chain CDR3 sequence comprising the amino acid sequence of SEQ ID NO:73; or
(i) a heavy chain CDR1 sequence comprising the amino acid sequence of SEQ ID NO:74, a heavy chain CDR2 sequence comprising the amino acid sequence of SEQ ID NO:75, a heavy chain CDR3 sequence comprising the amino acid sequence of SEQ ID NO:76, a light chain CDR1 sequence comprising the amino acid sequence of SEQ ID NO:77, a light chain CDR2 sequence comprising the amino acid sequence of SEQ ID NO:38, and a light chain CDR3 sequence comprising the amino acid sequence of SEQ ID NO:78; or
(j) a heavy chain CDR1 sequence comprising the amino acid sequence of SEQ ID NO:74, a heavy chain CDR2 sequence comprising the amino acid sequence of SEQ ID NO:79, a heavy chain CDR3 sequence comprising the amino acid sequence of SEQ ID NO:76, a light chain CDR1 sequence comprising the amino acid sequence of SEQ ID NO:77, a light chain CDR2 sequence comprising the amino acid sequence of SEQ ID NO:38, and a light chain CDR3 sequence comprising the amino acid sequence of SEQ ID NO:80; or
(k) a heavy chain CDR1 sequence comprising the amino acid sequence of SEQ ID NO:81, a heavy chain CDR2 sequence comprising the amino acid sequence of SEQ ID NO:82, a heavy chain CDR3 sequence comprising the amino acid sequence of SEQ ID NO:83, a light chain CDR1 sequence comprising the amino acid sequence of SEQ ID NO:60, a light chain CDR2 sequence comprising the amino acid sequence of SEQ ID NO:38, and a light chain CDR3 sequence comprising the amino acid sequence of SEQ ID NO:84; or
(l) a heavy chain CDR1 sequence comprising the amino acid sequence of SEQ ID NO:85, a heavy chain CDR2 sequence comprising the amino acid sequence of SEQ ID NO:86, a heavy chain CDR3 sequence comprising the amino acid sequence of SEQ ID NO:87, a light chain CDR1 sequence comprising the amino acid sequence of SEQ ID NO:88, a light chain CDR2 sequence comprising the amino acid sequence of SEQ ID NO:38, and a light chain CDR3 sequence comprising the amino acid sequence of SEQ ID NO:89; or
(m) a heavy chain CDR1 sequence comprising the amino acid sequence of SEQ ID NO:307, a heavy chain CDR2 sequence comprising the amino acid sequence of SEQ ID NO:308, a heavy chain CDR3 sequence comprising the amino acid sequence of SEQ ID NO:309, a light chain CDR1 sequence comprising the amino acid sequence of SEQ ID NO:311, a light chain CDR2 sequence comprising the amino acid sequence of SEQ ID NO:312, and a light chain CDR3 sequence comprising the amino acid sequence of SEQ ID NO:313; or
(n) a heavy chain CDR1 sequence comprising the amino acid sequence of SEQ ID NO:315, a heavy chain CDR2 sequence comprising the amino acid sequence of SEQ ID NO:316, a heavy chain CDR3 sequence comprising the amino acid sequence of SEQ ID NO:317, a light chain CDR1 sequence comprising the amino acid sequence of SEQ ID NO:48, a light chain CDR2 sequence comprising the amino acid sequence of SEQ ID NO:319, and a light chain CDR3 sequence comprising the amino acid sequence of SEQ ID NO:50.

132. The isolated antibody of claim 130 or 131, comprising a heavy chain variable region comprising an amino acid sequence that has at least 90% sequence identity to any one of SEQ ID NOs:6, 14, 15, 16, 17, 18, 19, 20, 21, 22, 23, 24, 306, and 314.

133. The isolated antibody of claim 130 or 131, comprising a light chain variable region comprising an amino acid sequence that has at least 90% sequence identity to any one of SEQ ID NOs:7, 25, 26, 27, 28, 29, 30, 31, 32, 33, 34, 35, 310, and 318.

134. The isolated antibody of any one of claims 129 to 131, comprising:
(a) a heavy chain variable region comprising an amino acid sequence that has at least 90% sequence identity to SEQ ID NO:6; and a light chain variable region comprising an amino acid sequence that has at least 90% sequence identity to SEQ ID NO:7; or
(b) a heavy chain variable region comprising an amino acid sequence that has at least 90% sequence identity to SEQ ID NO:14; and a light chain variable region comprising an amino acid sequence that has at least 90% sequence identity to SEQ ID NO:25; or
(c) a heavy chain variable region comprising an amino acid sequence that has at least 90% sequence identity to SEQ ID NO:15; and a light chain variable region comprising an amino acid sequence that has at least 90% sequence identity to SEQ ID NO:26; or
(d) a heavy chain variable region comprising an amino acid sequence that has at least 90% sequence identity to SEQ ID NO:16; and a light chain variable region comprising an amino acid sequence that has at least 90% sequence identity to SEQ ID NO:27; or
(e) a heavy chain variable region comprising an amino acid sequence that has at least 90% sequence identity to SEQ ID NO:17; and a light chain variable region comprising an amino acid sequence that has at least 90% sequence identity to SEQ ID NO:28; or
(f) a heavy chain variable region comprising an amino acid sequence that has at least 90% sequence identity to SEQ ID NO:18; and a light chain variable region comprising an amino acid sequence that has at least 90% sequence identity to SEQ ID NO:29; or
(g) a heavy chain variable region comprising an amino acid sequence that has at least 90% sequence identity to SEQ ID NO:19; and a light chain variable region comprising an amino acid sequence that has at least 90% sequence identity to SEQ ID NO:30; or
(h) a heavy chain variable region comprising an amino acid sequence that has at least 90% sequence identity to SEQ ID N020; and a light chain variable region comprising an amino acid sequence that has at least 90% sequence identity to SEQ ID NO:31; or
(i) a heavy chain variable region comprising an amino acid sequence that has at least 90% sequence identity to SEQ ID NO:21; and a light chain variable region comprising an amino acid sequence that has at least 90% sequence identity to SEQ ID NO:32; or
(j) a heavy chain variable region comprising an amino acid sequence that has at least 90% sequence identity to SEQ ID NO:22; and a light chain variable region comprising an amino acid sequence that has at least 90% sequence identity to SEQ ID NO:33; or
(k) a heavy chain variable region comprising an amino acid sequence that has at least 90% sequence identity to SEQ ID NO:23; and a light chain variable region comprising an amino acid sequence that has at least 90% sequence identity to SEQ ID NO:34; or
(l) a heavy chain variable region comprising an amino acid sequence that has at least 90% sequence identity to SEQ ID NO:24; and a light chain variable region comprising an amino acid sequence that has at least 90% sequence identity to SEQ ID NO:35; or
(m) a heavy chain variable region comprising an amino acid sequence that has at least 90% sequence identity to SEQ ID NO:306, and a light chain variable region comprising an amino acid sequence that has at least 90% sequence identity to SEQ ID NO:310; or
(n) a heavy chain variable region comprising an amino acid sequence that has at least 90% sequence identity to SEQ ID NO:314, and a light chain variable region comprising an amino acid sequence that has at least 90% sequence identity to SEQ ID NO:318.

135. The isolated antibody of any one of claims 1 to 134, wherein the antibody comprises a first Fc polypeptide and optionally a second Fc polypeptide.

136. The isolated antibody of claim 135, wherein the antibody comprises the first Fc polypeptide and the second Fc polypeptide.

137. The isolated antibody of claim 135 or 136, wherein the first Fc polypeptide is a modified Fc polypeptide and/or the second Fc polypeptide is a modified Fc polypeptide.

138. The isolated antibody of any one of claims 1 to 137, wherein the antibody comprises:
(a) a first antigen-binding portion comprising a first variable region that specifically binds to the human TREM2 protein, wherein the first antigen-binding portion comprises (i) a first heavy chain comprising a first Fc polypeptide and (ii) a first light chain; and
(b) a second antigen-binding portion comprising a second variable region that specifically binds to the human TREM2 protein, wherein the second antigen-binding portion comprises (i) a second heavy chain comprising a first Fc polypeptide and (ii) a second light chain;
wherein the first Fc polypeptide and the second Fc polypeptide form an Fc dimer.

139. The isolated antibody of claim 138, wherein the first Fc polypeptide is a modified Fc polypeptide and/or the second Fc polypeptide is a modified Fc polypeptide.

140. The isolated antibody of claim 138 or 139, wherein the first variable region and the second variable region recognize the same epitope in the human TREM2 protein.

141. The isolated antibody of claim 138 or 139, wherein the first variable region and the second variable region recognize different epitopes in the human TREM2 protein.

142. The isolated antibody of any one of claims 137 to 141, wherein the first Fc polypeptide and the second Fc polypeptide each contain modifications that promote heterodimerization.

143. The isolated antibody of claim 142, wherein one of the Fc polypeptides has a T366W substitution and the other Fc polypeptide has T366S, L368A, and Y407V substitutions, according to EU numbering.

144. The isolated antibody of any one of claims 137 to 143, wherein the first Fc polypeptide and/or the second Fc polypeptide comprises a native FcRn binding site.

145. The isolated antibody of any one of claims 137 to 143, wherein the first Fc polypeptide and/or the second Fc polypeptide comprises a modification that alters FcRn binding.

146. The isolated antibody of any one of claims 137 to 145, wherein the first Fc polypeptide and the second Fc polypeptide do not have effector function.

147. The isolated antibody of any one of claims 137 to 145, wherein the first Fc polypeptide and/or the second Fc polypeptide comprises a modification that reduces effector function.

148. The isolated antibody of claim 147, wherein the modification that reduces effector function comprises substitutions of Ala at position 234 and Ala at position 235, according to EU numbering.

149. The isolated antibody of any one of claims 137 to 148, wherein the first Fc polypeptide and/or the second Fc polypeptide comprises amino acid changes relative to the native Fc sequence that extend serum half-life.

150. The isolated antibody of claim 149, wherein the amino acid changes comprise substitutions of Tyr at position 252, Thr at position 254, and Glu at position 256, according to EU numbering.

151. The isolated antibody of claim 149, wherein the amino acid changes comprise substitutions of Leu at position 428 and Ser at position 434, according to EU numbering.

152. The isolated antibody of claim 149, wherein the amino acid changes comprise a substitution of Ser or Ala at position 434, according to EU numbering.

153. The isolated antibody of any one of claims 137 to 152, wherein the first Fc polypeptide and/or the second Fc polypeptide specifically binds to a transferrin receptor.

154. The isolated antibody of claim 153, wherein the first Fc polypeptide and/or the second Fc polypeptide comprises at least two substitutions at positions selected from the group consisting of 384, 386, 387, 388, 389, 390, 413, 416, and 421, according to EU numbering.

155. The isolated antibody of claim 154, wherein the first Fc polypeptide and/or the second Fc polypeptide comprises substitutions at least three, four, five, six, seven, eight, or nine of the positions.

156. The isolated antibody of claim 154 or 155, wherein the first Fc polypeptide and/or the second Fc polypeptide further comprises one, two, three, or four substitutions at positions comprising 380, 391, 392, and 415, according to EU numbering.

157. The isolated antibody of any one of claims 154 to 156, wherein the first Fc polypeptide and/or the second Fc polypeptide further comprises one, two, or three substitutions at positions comprising 414, 424, and 426, according to EU numbering.

158. The isolated antibody of any one of claims 154 to 157, wherein the first Fc polypeptide and/or the second Fc polypeptide comprises Trp at position 388.

159. The isolated antibody of any one of claims 154 to 158, wherein the first Fc polypeptide and/or the second Fc polypeptide comprises an aromatic amino acid at position 421.

160. The isolated antibody of claim 159, wherein the aromatic amino acid at position 421 is Trp or Phe.

161. The isolated antibody of any one of claims 154 to 160, wherein the first Fc polypeptide and/or the second Fc polypeptide comprises at least one position selected from the following: position 380 is Trp, Leu, or Glu; position 384 is Tyr or Phe; position 386 is Thr; position 387 is Glu; position 388 is Trp; position 389 is Ser, Ala, Val, or Asn; position 390 is Ser or Asn; position 413 is Thr or Ser; position 415 is Glu or Ser; position 416 is Glu; and position 421 is Phe.

162. The isolated antibody of claim 161, wherein the first Fc polypeptide and/or the second Fc polypeptide comprises 2, 3, 4, 5, 6, 7, 8, 9, 10, or 11 positions selected from the following: position 380 is Trp, Leu, or Glu; position 384 is Tyr or Phe; position 386 is Thr; position 387 is Glu; position 388 is Trp; position 389 is Ser, Ala, Val, or Asn; position 390 is Ser or Asn; position 413 is Thr or Ser; position 415 is Glu or Ser; position 416 is Glu; and position 421 is Phe.

163. The isolated antibody of claim 162, wherein the first Fc polypeptide and/or the second Fc polypeptide comprises 11 positions as follows: position 380 is Trp, Leu, or Glu; position 384 is Tyr or Phe; position 386 is Thr; position 387 is Glu; position 388 is Trp; position 389 is Ser, Ala, Val, or Asn; position 390 is Ser or Asn; position 413 is Thr or Ser; position 415 is Glu or Ser; position 416 is Glu; and position 421 is Phe.

164. The isolated antibody of claim 162 or 163, wherein the first Fc polypeptide and/or the second Fc polypeptide has a CH3 domain with at least 85% identity, at least 90% identity, or at least 95% identity to amino acids 111-217 of any one of SEQ ID NOs:100-185, 219-298, and 337-460.

165. The isolated antibody of claim 162 or 163, wherein the first Fc polypeptide and/or the second Fc polypeptide comprises the amino acid sequence of any one of SEQ ID NOs:100-185, 219-298, and 337-460.

166. The isolated antibody of claim 164 or 165, wherein the residues for at least 5, 6, 7, 8, 9, 10, 11, 12, 13, 14, 15, or 16 of the positions corresponding to EU index positions 380, 384, 386, 387, 388, 389, 390, 391, 392, 413, 414, 415, 416, 421, 424 and 426 of any one of SEQ ID NOs:100-185, 219-298, and 337-460 are not deleted or substituted.

167. The isolated antibody of any one of claims 153 to 166, wherein the first Fc polypeptide and/or the second Fc polypeptide binds to the apical domain of the transferrin receptor.

168. The isolated antibody of claim 167, wherein the binding of the antibody or antigen-binding portion thereof to the transferrin receptor does not substantially inhibit binding of transferrin to the transferrin receptor.

169. The isolated antibody of any one of claims 135 to 168, wherein the first Fc polypeptide and/or the second Fc polypeptide has an amino acid sequence identity of at least 75%, or at least 80%, 90%, 92%, or 95%, as compared to the corresponding wild-type Fc polypeptide.

170. The isolated antibody of claim 169, wherein the corresponding wild-type Fc polypeptide is a human IgG1, IgG2, IgG3, or IgG4 Fc polypeptide.

171. The isolated antibody of any one of claims 153 to 121, wherein uptake into the brain of the antibody or antigen-binding portion thereof is at least ten-fold greater as compared to the uptake of the antibody or antigen-binding portion thereof without the modifications in the first Fc polypeptide and/or the second Fc polypeptide that result in transferrin receptor binding.

172. The isolated antibody of any one of claims 135 to 171, wherein one of the Fc polypeptides is not modified to bind to a blood-brain barrier receptor and the other Fc polypeptide is modified to specifically bind to a transferrin receptor.

173. The isolated antibody of any one of claims 1 to 172, wherein the antibody or antigen-binding portion thereof exhibits cross-reactivity with a mouse TREM2 protein.

174. The isolated antibody of any one of claims 1 to 173, wherein the antibody is a monoclonal antibody.

175. The isolated antibody of any one of claims 1 to 173, wherein the antibody is a chimeric antibody.

176. The isolated antibody of any one of claims 1 to 173, wherein the antibody is a humanized antibody.

177. The isolated antibody of any one of claims 1 to 173, wherein the antibody is a fully human antibody.

178. The isolated antibody of any one of claims 1 to 173, wherein the antigen-binding portion is a Fab, a F(ab′)₂, a scFv, or a bivalent scFv.

179. The isolated antibody of any one of claims 1 to 178, wherein the antibody is a multispecific antibody.

180. The isolated antibody of claim 179, wherein the multispecific antibody is a bispecific antibody.

181. The isolated antibody of claim 180, wherein the bispecific antibody recognizes two different TREM2 epitopes.

182. The isolated antibody of claim 180 or 181, wherein the bispecific antibody is capable of inducing TREM2 clustering at the surface of a cell.

183. The isolated antibody of any one of claims 180 to 182, wherein the bispecific antibody has an EC5o that is at least 2-fold lower than a bivalent monospecific antibody comprising the same sequence as a single arm of the bispecific antibody.

184. The isolated antibody of any one of claims 180 to 183, wherein each of the two arms of the bispecific antibody is selected from an antibody clone selected from the group consisting of 2G4.B1, 3D3.A1, 7B10.A2, 13B11.A1, 14D5.F1, 14H11.A1, 21D4.D1, 21D6.G2, 21D11, 22B8.B1, 22G9.D1, 24B4.A1, 26D2.D1, 26D5.A1, 26D11.B1, 26E2.A3, 30A8.A1, 30F2.A2, 38E9.E5, 39H10.A1, 40H3.A4, 42E8.H1, 43E9.H1, 44E2.H1, 44E3.B1, 49H11.B1, 51D4, 52H9.D1, 53H11.D3, 54C2.A1, 55B9.A1, 57D7.A1, 59C6.F1, 60A4.B1, RS9.E2, RS9.F6, and RS9.F10, wherein the two arms are in different epitope bins.

185. A pharmaceutical composition comprising the isolated antibody of any one of claims 1 to 184 and a pharmaceutically acceptable carrier.

186. An antibody that competes with the isolated antibody of any one of claims 1 to 184 for binding to the human TREM2 protein.

187. A kit comprising:
the isolated antibody of any one of claims 1 to 184 or the pharmaceutical composition of claim 185; and
instructions for use thereof.

188. A method of treating a neurodegenerative disease, the method comprising administering to a subject having a neurodegenerative disease the isolated antibody of any one of claims 1 to 184 or the pharmaceutical composition of claim 185.

189. The method of claim 188, wherein the neurodegenerative disease is selected from the group consisting of Alzheimer's disease, primary age-related tauopathy, progressive supranuclear palsy (PSP), frontotemporal dementia, frontotemporal dementia with parkinsonism linked to chromosome 17, argyrophilic grain dementia, amyotrophic lateral sclerosis, amyotrophic lateral sclerosis/parkinsonism-dementia complex of Guam (ALS-PDC), corticobasal degeneration, chronic traumatic encephalopathy, Creutzfeldt-Jakob disease, dementia pugilistica, diffuse neurofibrillary tangles with calcification, Down's syndrome, familial British dementia, familial Danish dementia, Gerstmann-Straussler-Scheinker disease, globular glial tauopathy, Guadeloupean parkinsonism with dementia, Guadelopean PSP, Hallevorden-Spatz disease, hereditary diffuse leukoencephalopathy with spheroids (HDLS), Huntington's disease, inclusion-body myositis, multiple system atrophy, myotonic dystrophy, Nasu-Hakola disease, neurofibrillary tangle-predominant dementia, Niemann-Pick disease type C, pallido-ponto-nigral degeneration, Parkinson's disease, Pick's disease, postencephalitic parkinsonism, prion protein cerebral amyloid angiopathy, progressive subcortical gliosis, subacute sclerosing panencephalitis, and tangle only dementia.

190. The method of claim 189, wherein the neurodegenerative disease is Alzheimer's disease.

191. A method of decreasing levels of sTREM2 in a subject having a neurodegenerative disease, the method comprising administering to the subject the isolated antibody of any one of claims 1 to 22 or 72 to 184.

192. A method of increasing levels of sTREM2 in a subject having a neurodegenerative disease, the method comprising administering to the subject the isolated antibody of any one of claims 23 to 44 or 72 to 184.

193. A method of enhancing TREM2 activity in a subject having a neurodegenerative disease, the method comprising administering to the subject the isolated antibody of any one of claims 45 to 64 or 72 to 184.

194. The method of claim 193, wherein the isolated antibody or antigen-binding portion thereof is an antibody that enhances TREM2 activity that is induced by a ligand.

195. The method of claim 193, wherein the isolated antibody or antigen-binding portion thereof is an antibody that selectively enhances TREM2 activity.

196. The method of claim 193, wherein the isolated antibody or antigen-binding portion thereof is an antibody that enhances TREM2 activity without blocking binding of a native TREM2 ligand.

197. A method of inhibiting TREM2 activity in a subject having a neurodegenerative disease, the method comprising administering to the subject an isolated antibody of any one of claims 65 to 184.

198. The method of any one of claims 193 to 197, wherein the isolated antibody or antigen-binding portion thereof is an antibody that decreases levels of sTREM2.

199. The method of any one of claims 193 to 197, wherein the isolated antibody or antigen-binding portion thereof is an antibody that increases levels of sTREM2.

200. A method of identifying a subject having a neurodegenerative disease as a candidate for treatment with an anti-TREM2 antibody, the method comprising:
measuring the level of sTREM2 in a sample from the subject;
comparing the level of sTREM2 in the sample from the subject to a control value, wherein a level of sTREM2 in the sample from the subject that is elevated relative to the control value identifies the subject as a candidate for treatment; and
for a subject identified as a candidate for treatment, administering to the subject an isolated antibody or an antigen-binding portion thereof that specifically binds to a human TREM2 protein, wherein the isolated antibody or antigen-binding portion thereof decreases levels of sTREM2.

201. A method of treating a subject having a neurodegenerative disease that has been identified as a candidate for treatment with an anti-TREM2 antibody, wherein the subject been identified as having an elevated level of sTREM2, relative to a control value, the method comprising administering to the subject an isolated antibody or an antigen-binding portion thereof that specifically binds to a human TREM2 protein, wherein the isolated antibody or antigen-binding portion thereof decreases levels of sTREM2.

202. The method of claim 200 or 201, wherein the isolated antibody or antigen-binding portion thereof is the antibody of any one of claims 1 to 22 or 72 to 184.

203. A method of identifying a subject having a neurodegenerative disease as a candidate for treatment with an anti-TREM2 antibody, the method comprising:
measuring the level of sTREM2 in a sample from the subject;
comparing the level of sTREM2 in the sample from the subject to a control value, wherein a level of sTREM2 in the sample from the subject that is reduced relative to the control value identifies the subject as a candidate for treatment; and
for a subject identified as a candidate for treatment, administering to the subject an isolated antibody or an antigen-binding portion thereof that specifically binds to a human TREM2 protein, wherein the isolated antibody or antigen-binding portion thereof increases levels of sTREM2.

204. A method of treating a subject having a neurodegenerative disease that has been identified as a candidate for treatment with an anti-TREM2 antibody, wherein the subject has been identified as having a reduced level of sTREM2, relative to a control value, the method comprising administering to the subject an isolated antibody or an antigen-binding portion thereof that specifically binds to a human TREM2 protein, wherein the isolated antibody or antigen-binding portion thereof increases levels of sTREM2.

205. The method of claim 203 or 204, wherein the isolated antibody or antigen-binding portion thereof is the antibody of any one of claims 23 to 44 or 72 to 184.

206. A method of monitoring the efficacy of treatment with an anti-TREM2 antibody for a subject having a neurodegenerative disease, the method comprising:
measuring the level of sTREM2 in a first sample from the subject taken prior to an administration of an anti-TREM2 antibody;
treating the subject with an isolated antibody or an antigen-binding portion thereof that specifically binds to a human TREM2 protein; and
measuring the level of sTREM2 in a second sample from the subject taken subsequent to the administration of the anti-TREM2 antibody;
wherein a change in sTREM2 level in the second sample from the subject, as compared to the first sample from the subject, indicates that the subject is responding to treatment with the anti-TREM2 antibody.

207. The method of claim 71, wherein the isolated antibody or an antigen-binding portion thereof is the antibody of any one of claims 1 to 184.

208. The method of claim 206, wherein a decrease in sTREM2 level in the second sample from the subject, as compared to the first sample from the subject, indicates that the subject is responding to treatment with the anti-TREM2 antibody.

209. The method of claim 206, wherein an increase in sTREM2 level in the second sample from the subject, as compared to the first sample from the subject, indicates that the subject is responding to treatment with the anti-TREM2 antibody.

210. The method of any one of claims 191 to 209, wherein the neurodegenerative disease is selected from the group consisting of Alzheimer's disease, primary age-related tauopathy, progressive supranuclear palsy (PSP), frontotemporal dementia, frontotemporal dementia with parkinsonism linked to chromosome 17, argyrophilic grain dementia, amyotrophic lateral sclerosis, amyotrophic lateral sclerosis/parkinsonism-dementia complex of Guam (ALS-PDC), corticobasal degeneration, chronic traumatic encephalopathy, Creutzfeldt-Jakob disease, dementia pugilistica, diffuse neurofibrillary tangles with calcification, Down's syndrome, familial British dementia, familial Danish dementia, Gerstmann-Straussler-Scheinker disease, globular glial tauopathy, Guadeloupean parkinsonism with dementia, Guadelopean PSP, Hallevorden-Spatz disease, hereditary diffuse leukoencephalopathy with spheroids (HDLS), Huntington's disease, inclusion-body myositis, multiple system atrophy, myotonic dystrophy, Nasu-Hakola disease, neurofibrillary tangle-predominant dementia, Niemann-Pick disease type C, pallido-ponto-nigral degeneration, Parkinson's disease, Pick's disease, postencephalitic parkinsonism, prion protein cerebral amyloid angiopathy, progressive subcortical gliosis, subacute sclerosing panencephalitis, and tangle only dementia.

211. The method of claim 210, wherein the neurodegenerative disease is Alzheimer's disease.
